(19) United States
(12) Patent Application Publication
(10) Pub. No.: US 2015/0104468 A1
(43) Pub. Date: Apr. 16, 2015

(54) SITE-SPECIFIC LABELING METHODS AND MOLECULES PRODUCED THEREBY

(71) Applicants: Bernhard Hubert Geierstanger, Solana Beach, CA (US); Jan Grunewald, San Diego, CA (US); Badry Bursulaya, Escondido, CA (US)

(72) Inventors: Bernhard Hubert Geierstanger, Solana Beach, CA (US); Jan Grunewald, San Diego, CA (US); Badry Bursulaya, Escondido, CA (US)

(73) Assignee: IRM LLC, Hamilton (BM)

(21) Appl. No.: 14/402,808

(22) PCT Filed: May 31, 2013
(86) PCT No.: PCT/US2013/043684

§ 371 Date: Nov. 21, 2014

Related U.S. Application Data
(60) Provisional application No. 61/655,143, filed on Jun. 4, 2012.
(60) Provisional application No. 61/777,430, filed on Mar. 12, 2013.

(51) Int. Cl. A61K 47/48; C07K 16/32

(52) U.S. Cl. CPC A61K 47/48715; C07K 16/32; C07K 2319/90; C07K 2318/10
USPC 424/179.1; 530/387.3; 530/391.5; 530/391.9; 435/188; 536/23.4; 435/254.23; 435/254.6; 435/328; 435/68.1

(57) ABSTRACT

The present disclosure provides methods of site-specific labeling of antibodies, using proteins having 4′-phosphopantetheinyl transferase activity that catalyze post-translational modification of peptide sequences (“peptide tags”) incorporated into one or more specific sites of an antibody of interest. Enzymatic labeling enables quantitative and irreversible covalent modification of a specific serine residue within the peptide tags incorporated into the antibody, and thus creates desirable antibody conjugates.

### SEQUENCE LISTING

[0001] The instant application contains a Sequence Listing which has been submitted in ASCII format via EFS-Web and is hereby incorporated by reference in its entirety. Said ASCII copy, created on May 29, 2013, is named PAT055142_SL_{—}2.txt and is 1,800,691 bytes in size.

### FIELD OF THE INVENTION

[0002] The present invention relates to site-specific labeling process and molecules produced thereby.

### BACKGROUND

[0003] Conjugation has been widely used to optimize the properties of biologically active proteins, such as protein therapies, antibody drug conjugates (ADCs), vaccines, tissue selective targeting vehicles, molecular diagnostics, and protein nucleic acid conjugates. Traditional conjugation method utilizes lysine based covalent ligation, which makes it difficult to achieve homogeneity due to the abundance of lysines on the protein's surface.

[0004] Site-specific labeling of proteins can be achieved by post-translational enzymatic reactions, for example, using human O⁶-alkylguanine-DNA alkyl-transferase (AGT), biotin ligase, transglutaminase, sortase, cutinase, or 4′-phosphopantetheinyl transferases for the covalent attachment of a label to a protein.

[0005] For post-translational enzymatic reactions using human O⁶-alkylguanine-DNA alkyl-transferase, the AGT is fused to a target protein of interest, followed by the addition of a labeled O⁶-benzylguanine, which is a suicide substrate for the AGT (Keppler et al., Nat. Biotechnol. 21:86-89, 2003). This approach is the basis for a technology called SNAP-Tag™, which utilizes a 180 amino acid tag (Tirat et al., International Journal of Biological Macromolecules, 39:66-76, 2006). However, labeling of proteins using this approach occurs only at the C- or N-termini.

[0006] For biotin ligation, the enzyme biotin protein ligase (BPL) attaches biotin to the biotin carrier domain of certain carboxylases or decarboxylases. BPL catalyzes, in a two-step, adenosine-5′-triphosphate (ATP)-dependent reaction, the post-translational formation of an amide bond between the carboxyl group of biotin and the ε-amino group of a specific lysine residue located within a highly conserved Ala-Met-Lys-Met (SEQ ID NO: 1017) recognition located motif within the biotin carrier domain (Tirat et al., International Journal of Biological Macromolecules, 39:66-76, 2006). This approach can be used to create fusion tags at the C-terminus, the N-terminus or even within the target protein and is the basis for a technology called BioEase™ (72 amino acid tag) and AviTag™ (uses the biotin ligase, BirA and 15-residue acceptor peptide tag (AP)).

[0007] Transglutaminases catalyze the formation of stable isopeptidic bonds between the side chains of glutamine (Gln) and lysine (Lys) with the loss of ammonia, and have been used to label glutamine side chains in proteins with fluorophores in vitro (Sato et al., Biochemistry 35:13072-13080, 1996). Also, bacterial and human tissue transglutaminases (BTGase and TG2) have been used to catalyze the post-translational modification of different IgG's via the Lys or Gln side chains located in the IgG heavy chain (Mindt et al., Bioconjugate Chem. 19:271-278, 2008; Jeger et al., Angew. Chem. Int. 49:9995-9997, 2010).

[0008] Sortases have been used for C-terminal and N-terminal site specific modification of proteins, where sortase A catalyzes the transpeptidation reaction (Antos et al., JACS, 131:10800-10801, 2009).

[0009] Cutinase is a 22-kDa serine esterase that forms a site-specific covalent adduct with phosphonate ligands that is resistant to hydrolysis. Cutinases have been used for C-terminal and N-terminal site specific modification of antibodies followed by immobilization onto surfaces (Kwon et al., Anal. Chem. 76:5713-5720, 2004; Hodneland et al., Proc. Natl. Acad. Sci. U.S.A., 99:5048-5052, 2002).

[0010] 4′-Phosphopantetheinylation of acyl carrier proteins (ACPs) and peptidyl carrier proteins (PCPs) are involved in an essential post-translational modification that is required to activate metabolite synthesis by polyketide synthases (PKSs) and nonribosomal peptide synthetases (NRPSs), respectively (Fischbach et al., Chem. Rev. 106(8):3468-3496, 2006). The apo to holo conversion of ACPs and PCPs is catalyzed by 4′-phosphopantetheine (ppan) transferases, which attach a 4′-phospho-pantetheinyl moiety of coenzyme A (CoA) to an invariant serine residue of the protein domains (Lambalot et al., Chem. Biol. 3(11):923-936, 1996). Due to the comparably small size of the carrier proteins and the ability of 4′-phosphopantetheinyl transferases to accept functionalized CoA analogues as substrates, researchers have used carrier proteins as fusion tags to label target proteins with a variety of small molecule probes (see, e.g., La Clair et al., Chem. Biol. 11(2):195-201, 2004; Yin et al., J. Am. Chem. Soc. 126(25):7754-7755, 2004). In an effort to further reduce the carrier protein tag size, Walsh and co-workers used phage display to identify 8- to 12-residue peptides that are recognized as efficient substrates by the bacterial 4′-phosphopantetheinyl transferase Sfp (previously identified as a genetic locus responsible for surfactin production) and AcpS (Yin et al., Proc. Natl. Acad. Sci. USA 102(44):15815-15820, 2005; Zhou et al., ACS Chem. Biol. 2(5):337-346, 2007; Zhou et al., J. Am. Chem. Soc. 130(30):9925-9930, 2008).

[0011] Antibody drug conjugates (ADCs) have been used for the local delivery of cytotoxic agents in the treatment of cancer (see e.g., Lambert, Curr. Opinion In Pharmacology 5:543-549, 2005). ADCs allow targeted delivery of the drug moiety where maximum efficacy with minimal toxicity may be achieved. As more ADCs show promising clinical results, there is an increased need to develop stable engineered antibodies that provide reactive groups capable of conjugation to various agents, especially site-specific conjugations that can generate homogeneous immunoconjugates with a defined drug-to-antibody ratio for use in cancer therapy.

### SUMMARY

[0012] The present invention provides modified antibodies or fragments thereof, which comprise at least one peptide tag that is a substrate of 4′-phosphopantetheinyl transferase, and is located within the structural loop of said antibodies or antibody fragments. The present invention further provides immunoconjugates comprising such modified antibodies or antibody fragments, and a terminal group. The present invention also provides methods of making such modified antibodies, antibody fragments, and the immunoconjugates, as well as methods of using such compositions.

[0013] In some embodiments, the present invention provides modified antibodies or fragments thereof, which comprise at least one peptide tag that is a substrate of 4′-phosphopantetheinyl transferase, and is located within the structural loop of said antibodies or antibody fragments, and wherein the 4′-phosphopantetheinyl transferase is Sfp, AcpS, T. maritima PPTase, human PPTase or a mutant or homolog form thereof that retains the 4′-phosphopantetheinyl transferase activity. In some embodiments, the peptide tag is selected from the group consisting of: GDSLSWLLRLLN (SEQ ID NO: 1), GDSLSWL (SEQ ID NO: 2), GDSLSWLVRCLN (SEQ ID NO: 3), GDSLSWLLRCLN (SEQ ID NO: 4), GDSLSWLVRLLN (SEQ ID NO: 5), GDSLSWLLRSLN (SEQ ID NO: 6), GSQDVLDSLEFIASKLA (SEQ ID NO: 7), VLDSLEFIASKLA (SEQ ID NO: 8), DSLEFIASKLA (SEQ ID NO: 9), GDSLDMLEWSLM (SEQ ID NO: 10), GDSLDMLEWSL (SEQ ID NO: 11), GDSLDMLEWS (SEQ ID NO: 12), GDSLDMLEW (SEQ ID NO: 13), DSLDMLEW (SEQ ID NO: 14), GDSLDM (SEQ ID NO: 15), LDSVRMMALAAR (SEQ ID NO: 16), LDSLDMLEWSLR (SEQ ID NO: 17), DSLEFIASKL (SEQ ID NO: 18), DSLEFIASK (SEQ ID NO: 19), DVLDSLEFI (SEQ ID NO: 20), VLDSLEFIAS (SEQ ID NO: 21) and DSLDMLEWSL (SEQ ID NO: 1132). The present invention further provides immunoconjugates comprising such modified antibodies or fragments thereof.

[0014] In some embodiments, The present invention provides modified antibodies or fragments thereof, which comprise at least one peptide tag that is a substrate of 4′-phosphopantetheinyl transferase, and is located within the structural loop of VH, VL, CH1, CH2, CH3, or C_{L} region of the antibody or fragment thereof. In some embodiments, the peptide tag is inserted between any two amino acids that are listed in Table 1. In some embodiments, the present invention provides modified antibodies or antibody fragments comprising at least one peptide tag that is a substrate of 4′-phosphopantetheinyl transferase, and is located within the structural loop of the CH1 region of an antibody or fragment thereof. The present invention further provides immunoconjugates comprising such modified antibodies or fragments thereof.

[0015] In some embodiments, the peptide tag is inserted between amino acid residues 2 and 3 of the V_{H} or V_{L} domain, or between amino acid residues 63 and 64 of the V_{H} domain, or between 64 and 65 of the V_{H} domain, or between 138 and 139 of the CH1 domain, or between 197 and 198 of the CH1 domain, or between 359 and 360 of the CH3 domain, or between 388 and 389 of the CH3 domain, or after 447 of the CH3 domain of a parental antibody or fragment thereof. The present invention further provides immunoconjugates comprising such modified antibodies or fragments thereof.

[0016] In some embodiments, the peptide tag is inserted between amino acid residues 2 and 3 of the VH or VL domain, or between amino acid residue 110 and 111 of the light chain, or between 119 and 120, or between 120 and 121, or between 135 and 136, or between 136 and 137, or between 138 and 139, or between 162 and 163, or between 164 and 165, or between 165 and 166, or between 194 and 195, or between 195 and 196 of the CH1 domain, or between 388 and 389, or between 445 and 446, or between 446 and 447 of the CH3 domain of a parental antibody or fragment thereof. The present invention further provides immunoconjugates comprising such modified antibodies or fragments thereof.

[0017] In some embodiments, the peptide tag is inserted between amino acid residue 110 and 111 of the light chain, or between 119 and 120, or between 120 and 121, or between 135 and 136, or between 136 and 137, or between 138 and 139, or between 162 and 163, or between 164 and 165, or between 165 and 166, or between 194 and 195, or between 195 and 196 of the CH1 domain, or between 388 and 389 of the CH3 domain of a parental antibody or fragment thereof. The present invention further provides immunoconjugates comprising such modified antibodies or fragments thereof.

[0018] In some embodiments, the peptide tag is grafted between amino acid residues 62 to 64 or 62 to 65 of the V_{H} domain, or between amino acid residues 133 and 138 of the CH1 domain, or between 189 and 195 of the CH1 domain, or between 190 and 197 of the CH1 domain. The present invention further provides immunoconjugates comprising such modified antibodies or fragments thereof.

[0019] In some embodiments, the present invention provides modified antibodies or antibody fragments comprising SEQ ID NO: 103, SEQ ID NO: 109, SEQ ID NO:113, SEQ ID NO:121, SEQ ID NO:122, SEQ ID NO:127, SEQ ID NO:129, SEQ ID NO:130, SEQ ID NO:131, and/or SEQ ID NO:141. The present invention further provides immunoconjugates comprising such modified antibodies or fragments thereof.

[0020] In some embodiments, the present invention provides modified antibodies or antibody fragments comprising SEQ ID NO:26, SEQ ID NO:27, SEQ ID NO:32, SEQ ID NO:63, SEQ ID NO:94, SEQ ID NO:95, SEQ ID NO:96, SEQ ID NO:126, SEQ ID NO:127, SEQ ID NO:129, SEQ ID NO:130, SEQ ID NO:131, SEQ ID NO:132, SEQ ID NO:139, SEQ ID NO:149, SEQ ID NO:151, SEQ ID NO:152, SEQ ID NO:157, SEQ ID NO:158, SEQ ID NO:160, SEQ ID NO:166, SEQ ID NO:168, SEQ ID NO:169, SEQ ID NO:178, SEQ ID NO:179, SEQ ID NO:248, SEQ ID NO:250, SEQ ID NO:251, SEQ ID NO:256, SEQ ID NO:257, SEQ ID NO:259, SEQ ID NO:265, SEQ ID NO:267, SEQ ID NO:268, SEQ ID NO:277, SEQ ID NO:278, SEQ ID NO:348, SEQ ID NO:349, SEQ ID NO:356, SEQ ID NO:358, SEQ ID NO:359, SEQ ID NO:364, SEQ ID NO:365, SEQ ID NO:367, SEQ ID NO:371, SEQ ID NO:373, SEQ ID NO:374, SEQ ID NO:380, SEQ ID NO:381, SEQ ID NO:384, SEQ ID NO:386, SEQ ID NO:387, or SEQ ID NO:388. The present invention further provides immunoconjugates comprising such modified antibodies or fragments thereof.

[0021] In some embodiments, the present invention provides modified antibodies or antibody fragments comprising SEQ ID NO:32, SEQ ID NO:63, SEQ ID NO:127, SEQ ID NO:129, SEQ ID NO:132, SEQ ID NO:151, SEQ ID NO:152, SEQ ID NO:157, SEQ ID NO:158, SEQ ID NO:160, SEQ ID NO:166, SEQ ID NO:168, SEQ ID NO:169, SEQ ID NO:178, SEQ ID NO:179, SEQ ID NO:250, SEQ ID NO:251, SEQ ID NO:256, SEQ ID NO:257, SEQ ID NO:259, SEQ ID NO:265, SEQ ID NO:267, SEQ ID NO:268, SEQ ID NO:277, SEQ ID NO:278, SEQ ID NO:358, SEQ ID NO:359, SEQ ID NO:364, SEQ ID NO:365, SEQ ID NO:367, SEQ ID NO:371, SEQ ID NO:373, SEQ ID NO:374, SEQ ID NO:380, SEQ ID NO:381, or SEQ ID NO:384. The present invention further provides immunoconjugates comprising such modified antibodies or fragments thereof.

[0022] In one embodiment, the present invention provides modified antibodies or fragments thereof, which comprise at least one peptide tag that is a substrate of Sfp, and is located within the structural loop of said antibodies or antibody fragments, and wherein the peptide tag is GDSLSWLLRLLN (SEQ ID NO:1), GDSLSWLVRCLN (SEQ ID NO:3), GDSLSWLLRCLN (SEQ ID NO:4), GDSLSWLVRLLN (SEQ ID NO:5), GDSLSWLLRSLN (SEQ ID NO:6), GSQDVLDSLEFIASKLA (SEQ ID NO:7), VLDSLEFIASKLA (SEQ ID NO:8), DSLEFIASKLA (SEQ ID NO:9), GDSLDMLEWSLM (SEQ ID NO:10), GDSLDMLEWSL (SEQ ID NO:11), GDSLDMLEWS (SEQ ID NO:12), GDSLDMLEW (SEQ ID NO:13), DSLDMLEW (SEQ ID NO:14), LDSLDMLEWSLR (SEQ ID NO:17), DSLEFIASKL (SEQ ID NO:18), DSLEFIASK (SEQ ID NO:19), or DSLEFIAS (SEQ ID NO:1116). In another embodiment, the peptide tag is GDSLSWLLRLLN (SEQ ID NO:1), GDSLSWL (SEQ ID NO:2), DSLEFIASKLA (SEQ ID NO:9), GDSLDMLEWSLM (SEQ ID NO:10), DSLEFIASKL (SEQ ID NO:18), DSLEFIASK (SEQ ID NO:19), or DSLDMLEWSL (SEQ ID NO: 1132). The present invention further provides immunoconjugates comprising such modified antibodies or fragments thereof.

[0023] In some embodiments, the modified antibodies or antibody fragments of the invention are an isotype selected from IgG, IgM, IgE and IgA. In some other embodiments, the modified antibodies or antibody fragments of the invention are a subtype of IgG selected from IgG1, IgG2, IgG3 and IgG4. In some embodiments, the modified antibodies or antibody fragments of the invention are a human or humanized antibody or antibody fragment. In a specific embodiment, the modified antibody or antibody fragment of the invention is an anti-HER2 antibody or anti-HER2 antibody fragment. The present invention further provides immunoconjugates comprising such modified antibodies or fragments thereof.

[0024] The present invention provides nucleic acids encoding the modified antibodies or antibody fragments described herein, and host cells comprising such nucleic acids.

[0025] The present invention provides immunoconjugates comprising a modified antibody or fragment thereof, and a terminal group, wherein the modifice antibody or antibody fragment comprises at least one peptide tag that is a substrate of 4′-phosphopantetheinyl transferase, and is located within the structural loop of the antibody or antibody fragment. In some embodiments, the modified antibody or antibody fragment further comprises one or more orthogonal conjugation sites. In a specific embodiment, each orthogonal conjugation site is independently selected from a substrate of Sfp 4′-phosphopantetheinyl transferase, a substrate of AcpS 4′-phosphopantetheinyl transferase, a lysine, a cysteine, a tyrosine, a histidine, a formyl glycine, an unnatural amino acid, pyrrolysine and pyrroline-carboxylysine.

[0026] Another aspect provided herein are immunoconjugates comprising a modified antibody or antibody fragment, and a terminal group (TG) attached to the peptide tag in the modified antibody or antibody fragment by a linker having the structure according to Formula (I-b):

[chemical structure]

wherein:
[0027] L₁ is a bond, a non-enzymatically cleavable linker, a non-cleavable linker; an enzymatically cleavable linker, a photo stable linker or a photo-cleavable linker;
[0028] L₂ is a bond, a non-enzymatically cleavable linker, a non-cleavable linker; an enzymatically cleavable linker, a photo stable linker or a photo-cleavable linker;
[0029] L₃ is a bond, a non-enzymatically cleavable linker, a non-cleavable linker; an enzymatically cleavable linker, a photo stable linker or a photo-cleavable linker;
[0030] L₄ is a bond, a non-enzymatically cleavable linker, a non-cleavable linker; an enzymatically cleavable linker, a photo stable linker, a photo-cleavable linker or a self-immolative spacer,
[0031] the * denotes where the 4′-phosphopantetheinyl moiety is attached to the peptide tag,
[0032] and wherein the terminal group is a drug moiety, an affinity probe, a chelator, a spectroscopic probe, a radioactive probe, an imaging reagent, a lipid molecule, a polyethylene glycol, a polymer, a nanoparticle, a quantum dot, a liposome, a PLGA particle, a polysaccharide, an acetyl group, or a surface.

[0033] In certain embodiments of such immunoconjugates:
[0034] L₁ is -A₁X²— or —X²—; L₂ is a bond, -A₂-, or -A₂X²—;
[0035] L₃ is a bond, -A₃-, or -A₃X²—:
[0036] L₄ is a bond, -A₄-, -A₄X₂—,

[chemical structure]

[chemical structure]

[0037] A₁ is —C(═O)NH—, —NHC(═O)—, —C(═O)NH(CH₂)ₙ—, —C(═O)NH(C(R⁴)₂)ₙ—, —(O(CH₂)ₙ)ₘ—, —(O(C(R⁴)₂)ₙ)ₘ—, —((CH₂)ₙO)ₘ—, —(((C(R⁴)₂)ₙO)ₘ—, —((CH₂)ₙO)ₘ(CH₂)ₙ—, —(((C(R⁴)₂)ₙO)ₘC(R⁴)₂)ₙ—, —(CH₂)ₙC(═O)NH—, —(C(R⁴)₂)ₙC(═O)NH—, —(CH₂)ₙNHC(═O)—, —(C(R⁴)₂)ₙNHC(═O)—, —NHC(═O)(CH₂)ₙ—, —NHC(═O)(C(R⁴)₂)ₙ—, —C(═O)NH(CH₂)ₙS—, —C(═O)NH(C(R⁴)₂)ₙS—, —S(CH₂)ₙC(═O)NH—, —S(C(R⁴)₂)ₙC(═O)NH—, —C(═O)NH(CH₂)ₙNHC(═O)(CH₂)ₙ—, —C(═O)NH(C(R⁴)₂)ₙNHC(═O)(C(R⁴)₂)ₙ—, —C(═O)(CH₂)ₙ—, —C(═O)(C(R⁴)₂)ₙ—, —(CH₂)ₙC(═O)—, —(C(R⁴)₂)ₙC(═O)—, —(CH₂)ₙ(O(CH₂)ₙ)ₘNHC(═O)(CH₂)ₙ—, —(C(R⁴)₂)ₙ(O(C(R⁴)₂)ₙ)ₘNHC(═O)(C(R⁴)₂)ₙ—, —(CH₂)ₙNHC(═O)(CH₂)ₙ—, —(C(R⁴)₂)ₙNHC(═O)(C(R⁴)₂)ₙ—, —(CH₂)ₙNH((CH₂)ₙO)ₘ(CH₂)ₙ—, —(C(R⁴)₂)ₙNH((C(R⁴)₂)ₙO)ₘ(C(R⁴)₂)ₙ—, —(O(CH₂)ₙ)ₘNHC(═O)(CH₂)ₙ—, or —(O(C(R⁴)₂)ₙ)ₘNHC(═O)(C(R⁴)₂)ₙ—;
[0038] A₂ is —C(═O)NH—, —C(═O)NH(CH₂)ₙ—, —C(═O)NH(C(R⁴)₂)ₙ—, —(O(CH₂)ₙ)ₘ—, —(O(C(R⁴)₂)ₙ)ₘ—, —((CH₂)ₙO)ₘ—, —(((C(R⁴)₂)ₙO)ₘ—, —((CH₂)ₙO)ₘ(CH₂)ₙ—, —(((C(R⁴)₂)ₙO)ₘC(R⁴)₂)ₙ—, —(CH₂)ₙC(═O)NH—, —(C(R⁴)₂)ₙC(═O)NR⁴—, —(CH₂)ₙNHC(═O)—, —(C(R⁴)₂)ₙNHC(═O)—, —NHC(═O)(CH₂)ₙ—, —NHC(═O)(C(R⁴)₂)ₙ—, —C(═O)NH(CH₂)ₙS—, —C(═O)NH(C(R⁴)₂)ₙS—, —S(CH₂)ₙC(═O)NH—, —S(C(R⁴)₂)ₙC(═O)NH—, —(CH₂)ₙS—, —(C(R⁴)₂)ₙS—, —S(CH₂)ₙ—, —S(C(R⁴)₂)ₙ—, —(CH₂)ₙNH—, —(C(R⁴)₂)ₙNH—, —C(═O)NH(CH₂)ₙNHC(═O)(CH₂)ₙ—, —C(═O)NH(C(R⁴)₂)ₙNHC(═O)(C(R⁴)₂)ₙ—, —C(═O)(CH₂)ₙ—, —C(═O)(C(R⁴)₂)ₙ—, —(CH₂)ₙC(═O)—, —(C(R⁴)₂)ₙC(═O)—, —(CH₂)ₙ(O(CH₂)ₙ)ₘNHC(═O)(CH₂)ₙ—, —(C(R⁴)₂)ₙ(O(C(R⁴)₂)ₙ)ₘNHC(═O)(C(R⁴)₂)ₙ—, —(CH₂)ₙ(O(CH₂)ₙ)ₘOC(═O)NH(CH₂)ₙ—, —(C(R⁴)₂)ₙ(O(C(R⁴)₂)ₙ)ₘOC(═O)NH(C(R⁴)₂)ₙ—, —(CH₂)ₙNHC(═O)(CH₂)ₙ—, —(C(R⁴)₂)ₙNHC(═O)(C(R⁴)₂)ₙ—, —(CH₂)ₙNH((CH₂)ₙO)ₘ(CH₂)ₙ—, —(C(R⁴)₂)ₙNH((C(R⁴)₂)ₙO)ₘ(C(R⁴)₂)ₙ—, —(O(CH₂)ₙ)ₘNHC(═O)(CH₂)ₙ—, —(O(C(R⁴)₂)ₙ)ₘNHC(═O)(C(R⁴)₂)ₙ—,

[chemical structure]

[0039] A₃ is —C(═O)NH—, —C(═O)NH(CH₂)ₙ—, —C(═O)NH(C(R⁴)₂)ₙ—, —(O(CH₂)ₙ)ₘ—, —(O(C(R⁴)₂)ₙ)ₘ—, —((CH₂)ₙO)ₘ—, —(((C(R⁴)₂)ₙO)ₘ—, —((CH₂)ₙO)ₘ(CH₂)ₙ—, —(((C(R⁴)₂)ₙO)ₘC(R⁴)₂)ₙ—, —(CH₂)ₙC(═O)NH—, —(C(R⁴)₂)ₙC(═O)NH—, —(CH₂)ₙNHC(═O)—, —(C(R⁴)₂)ₙNHC(═O)—, —NHC(═O)(CH₂)ₙ—, —NHC(═O)(C(R⁴)₂)ₙ—, —C(═O)NH(CH₂)ₙS—, —C(═O)NH(C(R⁴)₂)ₙS—, —S(CH₂)ₙC(═O)NH—, —S(C(R⁴)₂)ₙC(═O)NH—, —(CH₂)ₙS—, —(C(R⁴)₂)ₙS—, —S(CH₂)ₙ—, —S(C(R⁴)₂)ₙ—, —C(═O)NH(CH₂)ₙNHC(═O)(CH₂)ₙ—, —C(═O)NH(C(R⁴)₂)ₙNHC(═O)(C(R⁴)₂)ₙ—, —C(═O)(CH₂)ₙ—, —C(═O)(C(R⁴)₂)ₙ—, —(CH₂)ₙC(═O)—, —(C(R⁴)₂)ₙC(═O)—, —(CH₂)ₙ(O(CH₂)ₙ)ₘNHC(═O)(CH₂)ₙ—, —(C(R⁴)₂)ₙ(O(C(R⁴)₂)ₙ)ₘNHC(═O)(C(R⁴)₂)ₙ—, —(CH₂)ₙ(O(CH₂)ₙ)ₘOC(═O)NH(CH₂)ₙ—, —(C(R⁴)₂)ₙ(O(C(R⁴)₂)ₙ)ₘOC(═O)NH(C(R⁴)₂)ₙ—, —(CH₂)ₙ(O(CH₂)ₙ)ₘOC(═O)—, —(C(R⁴)₂)ₙ(O(C(R⁴)₂)ₙ)ₘOC(═O)—, —(CH₂)ₙ(O(CH₂)ₙ)ₘOC(═O)—, —(C(R⁴)₂)ₙ(O(C(R⁴)₂)ₙ)ₘC(═O)—, —(CH₂)ₙNHC(═O)(CH₂)ₙ—, —(C(R⁴)₂)ₙNHC(═O)(C(R⁴)₂)ₙ—, —(O(CH₂)ₙ)ₘNHC(═O)(CH₂)ₙ—, —(O(C(R⁴)₂)ₙ)ₘNHC(═O)(C(R⁴)₂)ₙ—,

[chemical structure]

[0040] A₄ is —C(═O)NH—, —C(═O)NH(CH₂)ₙ—, —C(═O)NH(C(R⁴)₂)ₙ—, —(O(CH₂)ₙ)ₘ—, —(O(C(R⁴)₂)ₙ)ₘ—, —((CH₂)ₙO)ₘ—, —(((C(R⁴)₂)ₙO)ₘ—, —((CH₂)ₙO)ₘ(CH₂)ₙ—, —(((C(R⁴)₂)ₙO)ₘC(R⁴)₂)ₙ—, —(CH₂)ₙC(═O)NH—, —(C(R⁴)₂)ₙC(═O)NH—, —(CH₂)ₙNHC(═O)—, —(C(R⁴)₂)ₙNHC(═O)—, —NHC(═O)(CH₂)ₙ—, —NHC(═O)(C(R⁴)₂)ₙ—, —C(═O)NH(CH₂)ₙS—, —C(═O)NH(C(R⁴)₂)ₙS—, —S(CH₂)ₙC(═O)NH—, —S(C(R⁴)₂)ₙC(═O)NH—, —C(═O)NH(CH₂)ₙNHC(═O)(CH₂)ₙ—, —C(═O)NH(C(R⁴)₂)ₙNHC(═O)(C(R⁴)₂)ₙ—, —C(═O)(CH₂)ₙ—, —C(═O)(C(R⁴)₂)ₙ—, —(CH₂)ₙC(═O)—, —(C(R⁴)₂)ₙC(═O)—, —(CH₂)ₙ(O(CH₂)ₙ)ₘNHC(═O)(CH₂)ₙ—, —(C(R⁴)₂)ₙ(O(C(R⁴)₂)ₙ)ₘNHC(═O)(C(R⁴)₂)ₙ—, —(CH₂)ₙNHC(═O)(CH₂)ₙ—, —(C(R⁴)₂)ₙNHC(═O)(C(R⁴)₂)ₙ—, —(CH₂)ₙNH((CH₂)ₙO)ₘ(CH₂)ₙ—, —(C(R⁴)₂)ₙNH((C(R⁴)₂)ₙO)ₘ(C(R⁴)₂)ₙ—, —(O(CH₂)ₙ)ₘNHC(═O)(CH₂)ₙ—, or —(O(C(R⁴)₂)ₙ)ₘNHC(═O)(C(R⁴)₂)ₙ—;
[0041] each X² is independently selected from a bond,

[chemical structure]

[chemical structure]

[chemical structure]

—S—, —Si(OH)₂O—,

[chemical structure]

—CHR⁴(CH₂)ₙC(═O)NH—, —CHR⁴(CH₂)ₙNHC(═O)—, —C(═O)NH— and —NHC(═O)—;
[0042] each R⁴ is independently selected from H, C₁₋₄alkyl, —C(═O)OH and —OH,
[0043] each R⁵ is independently selected from H, C₁₋₄alkyl, phenyl or C₁₋₄alkyl substituted with 1 to 3 —OH groups;
[0044] each R⁶ is independently selected from H, fluoro, benzyloxy substituted with —C(═O)OH, benzyl substituted with —C(═O)OH, C₁₋₄alkoxy substituted with —C(═O)OH and C₁₋₄alkyl substituted with —C(═O)OH;
[0045] R⁷ is independently selected from H, phenyl and pyridine;
[0046] R⁸ is independently selected from

[chemical structure]

[0047] R⁹ is independently selected from H and C₁₋₆haloalkyl;
[0048] each n is independently selected from 1, 2, 3, 4, 5, 6, 7, 8 and 9, and
[0049] each m is independently selected from 1, 2, 3, 4, 5, 6, 7, 8 and 9.
   In other embodiments of such immunoconjugates:
[0050] L₁ is -A₁X²— or —X²—;
[0051] L₂ is a bond, -A₂-, or -A₂X²—;
[0052] L₃ is a bond, -A₃-, or -A₃X²—;
[0053] L₄ is a bond, -A₄-, -A₄X²—,

[chemical structure]

[0054] A₁ is —C(═O)NH—, —C(═O)NH(CH₂)ₙ—, —C(═O)NH(CH₂)ₙS—, —(O(CH₂)ₙ)ₘ—, —((CH₂)ₙO)ₘ(CH₂)ₙ—, —NHC(═O)(CH₂)ₙ—, —(CH₂)ₙNHC(═O)—, —C(═O)NH(CH₂)ₙNHC(═O)(CH₂)ₙ—, —(CH₂)ₙNHC((CH₂)ₙO)ₘ(CH₂)ₙ— or —(O(CH₂)ₙ)ₘNHC(═O)(CH₂)ₙ—;
[0055] A₂ is —C(═O)NH—, —C(═O)NH(CH₂)ₙ—, —C(═O)NH(CH₂)ₙS—, —(O(CH₂)ₙ)ₘ—, —((CH₂)ₙO)ₘ(CH₂)ₙ—, —NHC(═O)(CH₂)ₙ—, —(CH₂)ₙNHC(═O)—, —C(═O)NH(CH₂)ₙNHC(═O)(CH₂)ₙ—, —(CH₂)ₙNH((CH₂)ₙO)ₘ(CH₂)ₙ—, —(O(CH₂)ₙ)ₘNHC(═O)(CH₂)ₙ— or

[chemical structure]

[0056] A₃ is —C(═O)NH—, —C(═O)NH(CH₂)ₙ—, —C(═O)NH(CH₂)ₙS—, —(O(CH₂)ₙ)ₘ, —((CH₂)ₙO)ₘ(CH₂)ₙ—, —NHC(═O)(CH₂)ₙ—, —(CH₂)ₙNHC(═O)—, —C(═O)NH(CH₂)ₙNHC(═O)(CH₂)ₙ—, —(CH₂)ₙNH((CH₂)ₙO)ₘ(CH₂)ₙ—, —(O(CH₂)ₙ)ₘNHC(═O)(CH₂)ₙ— or

[chemical structure]

[0057] A₄ is —C(═O)NH—, —C(═O)NH(CH₂)ₙ—, —C(═O)NH(CH₂)ₙS—, —(O(CH₂)ₙ)ₘ, —((CH₂)ₙO)ₘ(CH₂)ₙ—, —NHC(═O)(CH₂)ₙ—, —(CH₂)ₙNHC(═O)—, —C(═O)NH(CH₂)ₙNHC(═O)(CH₂)ₙ—, —(CH₂)ₙNH((CH₂)ₙO)ₘ(CH₂)ₙ— or —(O(CH₂)ₙ)ₘNHC(═O)(CH₂)ₙ—;
[0058] each X² is independently selected from a bond,

[chemical structure]

[chemical structure]

[chemical structure]

[0059] —S—, —Si(OH)₂O—,

[chemical structure]

—CHR⁴(CH₂)ₙC(═O)NH—, —CHR⁴(CH₂)ₙNHC(═O)—, —C(═O)NH— and —NHC(═O)—;
[0060] each R⁴ is independently selected from H, C₁₋₄alkyl, —C(═O)OH and —OH,
[0061] each R⁵ is independently selected from H, C₁₋₄alkyl, phenyl or C₁₋₄alkyl substituted with 1 to 3 —OH groups;
[0062] each R⁶ is independently selected from H, fluoro, benzyloxy substituted with —C(═O)OH, benzyl substituted with —C(═O)OH, C₁₋₄alkoxy substituted with —C(═O)OH and C₁₋₄alkyl substituted with —C(═O)OH;
[0063] R⁷ is independently selected from H, phenyl and pyridine;
[0064] R⁸ is independently selected from

[chemical structure]

[0065] R⁹ is independently selected from H and C₁₋₆haloalkyl;
[0066] each n is independently selected from 1, 2, 3, 4, 5, 6, 7, 8 and 9, and
[0067] each m is independently selected from 1, 2, 3, 4, 5, 6, 7, 8 and 9.
   In certain embodiments of such aforementioned immunoconjugates, the linker of Formula (I-b) is a linker having the structure according to Formula (I-c):

[chemical structure]

In other embodiments of such aforementioned immunoconjugates:
[0068] L₁ is -A₁X²—, where A₁ is —C(═O)NH(CH₂)ₙS— and X² is

[chemical structure]

[0069] L₂ is a bond; L₃ is a bond, and L₄ is -A₄- wherein A₄ is —(CH₂)ₙNHC(═O)—.
   In other embodiments of such aforementioned immunoconjugates:
[0070] L₁ is -A₁X²—, wherein A₁ is —C(═O)NH(CH₂)ₙS— and X² is

[chemical structure]

[0071] L₂ is a bond; L₃ is a bond; L₄ is -A₄-, wherein A₄ is —(CH₂)ₙC(═O)—.
   In other embodiments of such immunoconjugates:
[0072] L₁ is -A₁X²—, wherein A₁ is —C(═O)NH(CH₂)ₙS— and X² is

[chemical structure]

[0073] L₂ is -A₂-, wherein A₂ is —(CH₂)ₙC(═O;
[0074] L₃ is -A₃-, wherein A₃ is

[chemical structure]

and
[0075] L₄ is

[chemical structure]

In other embodiments of such aforementioned immunoconjugates:
[0076] L₁ is a -A₁X²—, wherein A₁ is —C(═O)NH(CH₂)ₙS— and X² is —(CH₂)ₙC(═O)NH—;
[0077] L₂ is a bond-; L₃ is -A₃-, wherein A₃ is —(CH₂)ₙC(═O)—, and L₄ is a bond.
   In other embodiments of such aforementioned immunoconjugates:
[0078] L₁ is a -A₁X²—, wherein A₁ is —C(═O)NH(CH₂)ₙS—, X² is —CHR⁴(CH₂)ₙC(═O)NH— and R⁴ is —C(═O)OH;
[0079] L₂ is a bond; L₃ is -A₃-, wherein A₃ is —(CH₂)ₙC(═O)— and. L₄ is a bond.
   In other embodiments of such aforementioned immunoconjugates:
[0080] L₁ is -A₁X²—, where A₁ is —C(═O)NH(CH₂)ₙS— and X² is —(CH₂)C(═O)NH—;
[0081] L₂ is a bond; L₃ is a bond, and L₄ is -A₄- wherein A₄ is —(CH₂)ₙNHC(═O)—.
   In other embodiments of such aforementioned immunoconjugates:
[0082] L₁ is -A₁X²—, wherein A₁ is —C(═O)NH(CH₂)ₙS— and X² is —(CH₂)C(═O)NH—;
[0083] L₂ is a bond; L₃ is a bond; L₄ is -A₄-, wherein A₄ is —(CH₂)ₙC(═O)—.
   In other embodiments of such aforementioned immunoconjugates:
[0084] L₁ is -A₁X²—, wherein A₁ is —C(═O)NH(CH₂)ₙS— and X² is —(CH₂)C(═O)NH—;
[0085] L₂ is -A₂-, wherein A₂ is —(CH₂)ₙC(═O;
[0086] L₃ is -A₃-, wherein A₃ is

[chemical structure]

and
[0087] L₄ is

[chemical structure]

In other embodiments of such aforementioned immunoconjugates:
[0088] L₁ is a -A₁X²—, wherein A₁ is —C(═O)NH(CH₂)ₙS— and X² is —(CH₂)C(═O)NH—;
[0089] L₂ is a bond-; L₃ is -A₃-, wherein A₃ is —(CH₂)ₙC(═O)—, and L₄ is a bond.
   In other embodiments of such aforementioned immunoconjugates:
[0090] L₁ is a -A₁X²—, wherein A₁ is —C(═O)NH(CH₂)ₙS—, X² is —CHR⁴(CH₂)ₙC(═O)NH— and R⁴ is —C(═O)OH;
[0091] L₂ is a bond; L₃ is -A₃-, wherein A₃ is —(CH₂)ₙC(═O)— and. L₄ is a bond.

[0092] In the embodiments of the aforementioned immunoconjugates the terminal group is a drug moiety selected from an anti-inflammatory agent, an anticancer agent, an antifungal agent, an antibacterial agent, an anti-parasitic agent, an anti-viral agent and an anesthetic agent. In certain embodiments of such immunoconjugates the drug moiety is selected from a V-ATPase inhibitor, a HSP90 inhibitor, an IAP inhibitor, an mTor inhibitor, a microtubule stabilizer, a microtubule destabilizers, an auristatin, a dolastatin, a maytansinoid, a MetAP (methionine aminopeptidase), an inhibitor of nuclear export of proteins CRM1, a DPPIV inhibitor, an inhibitors of phosphoryl transfer reactions in mitochondria, a protein synthesis inhibitor, a CDK2 inhibitor, a CDK9 inhibitor, an Eg5 inhibitor, an HDAC inhibitor, a DNA damaging agent, a DNA alkylating agent, a DNA intercalator, a DNA minor groove binder, a proteasome inhibitor, a RNA polymerase inhibitor and a DHFR inhibitor. In certain embodiments of such immunoconjugates the spectroscopic probe is selected from a fluorophore, a chromophore, a quantum dot, a magnetic probe, a radioactive probe, an imaging reagent, or a contrast reagent. In certain embodiments of such immunoconjugates the affinity probe is biotin.

[0093] Another aspect provided herein is the preparation of an immunoconjugate by a process comprising the steps of:
[0094] (a) providing a modified antibody or fragment thereof, wherein the modified antibody or fragment comprises a peptide tag, and wherein the peptide tag is a substrate of an enzyme having phosphopantetheinyl transferase activity, and
[0095] (b) labeling the modified antibody or antibody fragment with a terminal group by incubating the modified antibody or fragment thereof with an enzyme having phosphopantetheinyl transferase activity in the presence of a coenzyme A analogue having the structure of Formula B:

[chemical structure]

[0096] wherein L₁, L₂, L₃, L₄, R₂ and TG are as defined herein;
thereby the terminal group is attached to the peptide tag by a linker having the structure according to Formula (I-b):

[chemical structure]

[0097] where the * denotes the phosphopantetheinyl moiety is attached to the peptide tag. In certain embodiments the compound of Formula (B) is selected from

[chemical structure]

[chemical structure]

[chemical structure]

Another aspect provided herein is the preparation of an immunoconjugate by a process comprising the steps of:
[0098] (a) providing a modified antibody or fragment thereof, wherein the a modified antibody or fragment thereof, comprises a peptide tag, and wherein the peptide tag is a substrate of an enzyme having phosphopantetheinyl transferase activity;
[0099] (b) labeling the modified antibody or fragment thereof, with a terminal group (TG) by
   [0100] i) incubating the modified antibody or fragment thereof, with an enzyme having phosphopantetheinyl transferase activity in the presence of a compound of Formula (D),

[chemical structure]

thereby attaching an activated phosphopentathienyl group of Formula (D-a) to the peptide tag,

[chemical structure]

wherein R₁ is a functional group; and
[0101] ii) reacting the functional group R₁ of the activated phosphopentathienyl group with a compound of Formula (II-a),

X-L₂-L₂-L₄-TG Formula (II-a)
wherein X is a group which reacts with functional group R₁, wherein:
   [0102] when X is a thiol, then R₁ is a thiol, a maleimide or a haloacetamide; or,
   [0103] when X is a an azide, then R₁ is an alkyne, a triaryl phosphine, a cyclooctene or an oxanobornadiene; or,
   [0104] when X is a a triaryl phosphine, then R₁ is an azide; or,
   [0105] when X is a an oxanobornadiene, then R₁ is an azide; or,
   [0106] when X is a an alkyne, then R₁ is an azide; or,
   [0107] when X is a an alkene, then R₁ is an azide; or,
   [0108] when X is a a cyclooctene, then R₁ is a diaryl tetrazine; or,
   [0109] when X is a a diaryl tetrazine, then R₁ is a cyclooctene; or,
   [0110] when X is a a monoaryl tetrazine, then R₁ is a norbornene; or,
   [0111] when X is a a norbornene, then R₁ is a monoaryl tetrazine; or,
   [0112] when X is a an aldehyde, then R₁ is a hydroxylamine or a hydrazine or NH₂—NH—C(═O)—; or,
   [0113] when X is a a ketone, then R₁ is a hydroxylamine or a hydrazine or NH₂—NH—C(═O)—; or,
   [0114] when X is a a hydroxylamine, then R₁ is an aldehyde or a ketone; or,
   [0115] when X is a a hydrazine, then R₁ is an aldehyde or a ketone; or,
   [0116] when X is a NH₂—NH—C(═O)—, then R₁ is an aldehyde or a ketone; or,
   [0117] when X is a a haloacetamide, then R₁ is a thiol; or,
   [0118] when X is a a maleimide, then R₁ is a thiol;
[0119] thereby the terminal group is attached to the peptide tag by a linker having the structure according to Formula (II-b):

[chemical structure]

[0120] where the * denotes the phosphopantetheinyl moiety is attached to the peptide tag, and wherein A₁, X₂, L₂, L₃, L₄, R₂ and TG are as defined herein.
   Another aspect provided herein is the preparation of an immunoconjugate by a process comprising the steps of:
[0121] (a) providing a modified antibody or fragment thereof, wherein the modified antibody or fragment thereof comprises a peptide tag, and wherein the peptide tag is a substrate of an enzyme having phosphopantetheinyl transferase activity;
[0122] (b) labeling the modified antibody or fragment thereof with a terminal group (TG)
   [0123] i) by incubating the modified antibody or fragment thereof with an enzyme having phosphopantetheinyl transferase activity in the presence of a compound of Formula (E),

[chemical structure]

thereby attaching an activated phosphopentathienyl group of Formula (E-a) to the peptide tag,

[chemical structure]

wherein R₁ is a functional group;
[0124] and
[0125] ii) reacting the functional group R₁ of the activated phosphopentathienyl group with a compound of Formula (II-c),

X-L₃-L₄-TG Formula (II-c)
wherein X is a group which reacts with functional group R₁, wherein:
   [0126] when X is a thiol, then R₁ is a thiol, a maleimide or a haloacetamide; or,
   [0127] when X is a an azide, then R₁ is an alkyne, a triaryl phosphine, a cyclooctene or an oxanobornadiene; or,
   [0128] when X is a a triaryl phosphine, then R₁ is an azide; or,
   [0129] when X is a an oxanobornadiene, then R₁ is an azide; or,
   [0130] when X is a an alkyne, then R₁ is an azide; or,
   [0131] when X is a an alkene, then R₁ is an azide; or,
   [0132] when X is a a cyclooctene, then R₁ is a diaryl tetrazine; or,
   [0133] when X is a a diaryl tetrazine, then R₁ is a cyclooctene; or,
   [0134] when X is a a monoaryl tetrazine, then R₁ is a norbornene; or,
   [0135] when X is a a norbornene, then R₁ is a monoaryl tetrazine; or,
   [0136] when X is a an aldehyde, then R₁ is a hydroxylamine or a hydrazine or NH₂—NH—C(═O)—; or,
   [0137] when X is a a ketone, then R₁ is a hydroxylamine or a hydrazine or NH₂—NH—C(═O)—; or,
   [0138] when X is a a hydroxylamine, then R₁ is an aldehyde or a ketone; or,
   [0139] when X is a a hydrazine, then R₁ is an aldehyde or a ketone; or,
   [0140] when X is a NH₂—NH—C(═O)—, then R₁ is an aldehyde or a ketone; or,
   [0141] when X is a a haloacetamide, then R₁ is a thiol; or,
   [0142] when X is a a maleimide, then R₁ is a thiol;
[0143] thereby the terminal group is attached to the peptide tag by a linker having the structure according to Formula (II-d):

[chemical structure]

[0144] where the * denotes the phosphopantetheinyl moiety is attached to the peptide tag, and wherein L₁, A₂, X₂, L₃, L₄, R₂ and TG are as defined herein.
   Another aspect provided herein is the preparation of an immunoconjugate by a process comprising the steps of:
[0145] (a) providing a modified antibody or fragment thereof, wherein the modified antibody or fragment thereof comprises a peptide tag, and wherein the peptide tag is a substrate of an enzyme having phosphopantetheinyl transferase activity;
[0146] (b) labeling the modified antibody or fragment thereof with a terminal group (TG)
   [0147] i) by incubating the modified antibody or fragment thereof with an enzyme having phosphopantetheinyl transferase activity in the presence of a compound of Formula (F),

[chemical structure]

thereby attaching an activated phosphopentathienyl group of Formula (F-a) to the peptide tag,

[chemical structure]

wherein R₁ is a functional group;
[0148] and
[0149] ii) reacting the functional group R₁ of the activated phosphopentathienyl group with a compound of Formula (II-e),

X-L₄-TG Formula (II-e)
wherein X is a group which reacts with functional group R₁, wherein:
   [0150] when X is a thiol, then R₁ is a thiol, a maleimide or a haloacetamide; or,
   [0151] when X is a an azide, then R₁ is an alkyne, a triaryl phosphine, a cyclooctene or an oxanobornadiene; or,
   [0152] when X is a a triaryl phosphine, then R₁ is an azide; or,
   [0153] when X is a an oxanobornadiene, then R₁ is an azide; or,
   [0154] when X is a an alkyne, then R₁ is an azide; or,
   [0155] when X is a an alkene, then R₁ is an azide; or,
   [0156] when X is a a cyclooctene, then R₁ is a diaryl tetrazine; or,
   [0157] when X is a a diaryl tetrazine, then R₁ is a cyclooctene; or,
   [0158] when X is a a monoaryl tetrazine, then R₁ is a norbornene; or,
   [0159] when X is a a norbornene, then R₁ is a monoaryl tetrazine; or,
   [0160] when X is a an aldehyde, then R₁ is a hydroxylamine or a hydrazine or NH₂—NH—C(═O)—; or,
   [0161] when X is a a ketone, then R₁ is a hydroxylamine or a hydrazine or NH₂—NH—C(═O)—; or,
   [0162] when X is a a hydroxylamine, then R₁ is an aldehyde or a ketone; or,
   [0163] when X is a a hydrazine, then R₁ is an aldehyde or a ketone; or,
   [0164] when X is a NH₂—NH—C(═O)—, then R₁ is an aldehyde or a ketone; or,
   [0165] when X is a a haloacetamide, then R₁ is a thiol; or,
   [0166] when X is a a maleimide, then R₁ is a thiol;
[0167] thereby the terminal group is attached to the peptide tag by a linker having the structure according to Formula (II-f):

[chemical structure]

[0168] where the * denotes the phosphopantetheinyl moiety is attached to the peptide tag, and wherein L₁, L₂, A₃, X₂, L₄, R₂ and TG are as defined herein.
   Another aspect provided herein is the preparation of an immunoconjugate by a process comprising the steps of:
[0169] (a) providing a modified antibody or fragment thereof, wherein the modified antibody or fragment thereof comprises a peptide tag, and wherein the peptide tag is a substrate of an enzyme having phosphopantetheinyl transferase activity;
[0170] (b) labeling the modified antibody or fragment thereof with a terminal group (TG)
   [0171] i) by incubating the modified antibody or fragment thereof with an enzyme having phosphopantetheinyl transferase activity in the presence of a compound of Formula (G),

[chemical structure]

thereby attaching an activated phosphopentathienyl group of Formula (G-a) to the peptide tag,

[chemical structure]

wherein R₁ is a functional group;
[0172] and
[0173] ii) reacting the functional group R₁ of the activated phosphopentathienyl group with a compound of Formula (II-g),

X-TG Formula (II-g)
wherein X is a group which reacts with functional group R₁, wherein:
   [0174] when X is a thiol, then R₁ is a thiol, a maleimide or a haloacetamide; or,
   [0175] when X is a an azide, then R₁ is an alkyne, a triaryl phosphine, a cyclooctene or an oxanobornadiene; or,
   [0176] when X is a a triaryl phosphine, then R₁ is an azide; or,
   [0177] when X is a an oxanobornadiene, then R₁ is an azide; or,
   [0178] when X is a an alkyne, then R₁ is an azide; or,
   [0179] when X is a an alkene, then R₁ is an azide; or,
   [0180] when X is a a cyclooctene, then R₁ is a diaryl tetrazine; or,
   [0181] when X is a a diaryl tetrazine, then R₁ is a cyclooctene; or,
   [0182] when X is a a monoaryl tetrazine, then R₁ is a norbornene; or,
   [0183] when X is a a norbornene, then R₁ is a monoaryl tetrazine; or,
   [0184] when X is a an aldehyde, then R₁ is a hydroxylamine or a hydrazine or NH₂—NH—C(═O)—; or,
   [0185] when X is a a ketone, then R₁ is a hydroxylamine or a hydrazine or NH₂—NH—C(═O)—; or,
   [0186] when X is a a hydroxylamine, then R₁ is an aldehyde or a ketone; or,
   [0187] when X is a a hydrazine, then R₁ is an aldehyde or a ketone; or,
   [0188] when X is a NH₂—NH—C(═O)—, then R₁ is an aldehyde or a ketone; or,
   [0189] when X is a a haloacetamide, then R₁ is a thiol; or,
   [0190] when X is a a maleimide, then R₁ is a thiol;
[0191] thereby the terminal group is attached to the peptide tag by a linker having the structure according to Formula (II-h):

[chemical structure]

[0192] where the * denotes the phosphopantetheinyl moiety is attached to the peptide tag, and wherein L₁, L₂, L₃, A₄, X₂, R₂ and TG are as defined herein.
   Another aspect provided herein is the preparation of an immunoconjugate by a process comprising the steps of:
[0193] (a) providing a modified antibody or fragment thereof, wherein the modified antibody or fragment thereof comprises a peptide tag, and wherein the peptide tag is a substrate of an enzyme having phosphopantetheinyl transferase activity;
[0194] (b) labeling the modified antibody or fragment thereof with a terminal group (TG) by incubating the modified antibody or fragment thereof with an enzyme having phosphopantetheinyl transferase activity in the presence of a compound of Formula (H),

[chemical structure]

[0195] thereby attaching a protected phosphopentathienyl group of Formula (H-a) to the peptide tag,

[chemical structure]

[0196] wherein R₁—PG is a protected functional group R₁;
[0197] (c) deprotecting the protected phosphopentathienyl group to give an activated phosphopentathienyl group of Formula (D-a) attached to the peptide tag,

[chemical structure]

[0198] wherein R₁ is a functional group;
[0199] and
[0200] (d) reacting the functional group R₁ of the activated phosphopentathienyl group with a compound of Formula (II-a),

X-L₂-L₃-L₄-TG Formula (II-a)
[0201] wherein X is a group which reacts with functional group R₁, wherein:
   [0202] when X is a thiol, then R₁ is a thiol, a maleimide or a haloacetamide; or,
   [0203] when X is a an azide, then R₁ is an alkyne, a triaryl phosphine, a cyclooctene or an oxanobornadiene; or,
   [0204] when X is a a triaryl phosphine, then R₁ is an azide; or,
   [0205] when X is a an oxanobornadiene, then R₁ is an azide; or,
   [0206] when X is a an alkyne, then R₁ is an azide; or,
   [0207] when X is a an alkene, then R₁ is an azide; or,
   [0208] when X is a a cyclooctene, then R₁ is a diaryl tetrazine; or,
   [0209] when X is a a diaryl tetrazine, then R₁ is a cyclooctene; or,
   [0210] when X is a a monoaryl tetrazine, then R₁ is a norbornene; or,
   [0211] when X is a a norbornene, then R₁ is a monoaryl tetrazine; or,
   [0212] when X is a an aldehyde, then R₁ is a hydroxylamine or a hydrazine or NH₂—NH—C(═O)—; or,
   [0213] when X is a a ketone, then R₁ is a hydroxylamine or a hydrazine or NH₂—NH—C(═O)—; or,
   [0214] when X is a a hydroxylamine, then R₁ is an aldehyde or a ketone; or,
   [0215] when X is a a hydrazine, then R₁ is an aldehyde or a ketone; or,
   [0216] when X is a NH₂—NH—C(═O)—, then R₁ is an aldehyde or a ketone; or,
   [0217] when X is a a haloacetamide, then R₁ is a thiol; or,
   [0218] when X is a a maleimide, then R₁ is a thiol;
[0219] thereby the terminal group is attached to the peptide tag by a linker having the structure according to Formula (II-b):

[chemical structure]

[0220] where the * denotes the phosphopantetheinyl moiety is attached to the peptide tag, and wherein A₁, X₂, L₂, L₃, L₄, R₂, PG and TG are as defined herein.
   Another aspect provided herein is the preparation of an immunoconjugate by a process comprising the steps of:
[0221] (a) providing a modified antibody or fragment thereof, wherein the modified antibody or fragment thereof comprises a peptide tag, and wherein the peptide tag is a substrate of an enzyme having phosphopantetheinyl transferase activity;
[0222] (b) labeling the modified antibody or fragment thereof with a terminal group (TG) by incubating the modified antibody or fragment thereof with an enzyme having phosphopantetheinyl transferase activity in the presence of a compound of Formula (J),

[chemical structure]

[0223] thereby attaching a protected phosphopentathienyl group of Formula (J-a) to the peptide tag,

[chemical structure]

[0224] wherein R₁—PG is a protected functional group R₁;
[0225] (c) deprotecting the protected phosphopentathienyl group to give an activated phosphopentathienyl group of Formula (E-a) attached to the peptide tag,

[chemical structure]

[0226] wherein R₁ is a functional group;
[0227] and
[0228] (d) reacting the functional group R₁ of the activated phosphopentathienyl group with a compound of Formula (II-c),

X-L₃-L₄-TG Formula (II-c)
[0229] wherein X is a group which reacts with functional group R₁, wherein:
   [0230] when X is a thiol, then R₁ is a thiol, a maleimide or a haloacetamide; or,
   [0231] when X is a an azide, then R₁ is an alkyne, a triaryl phosphine, a cyclooctene or an oxanobornadiene; or,
   [0232] when X is a a triaryl phosphine, then R₁ is an azide; or,
   [0233] when X is a an oxanobornadiene, then R₁ is an azide; or,
   [0234] when X is a an alkyne, then R₁ is an azide; or,
   [0235] when X is a an alkene, then R₁ is an azide; or,
   [0236] when X is a a cyclooctene, then R₁ is a diaryl tetrazine; or,
   [0237] when X is a a diaryl tetrazine, then R₁ is a cyclooctene; or,
   [0238] when X is a a monoaryl tetrazine, then R₁ is a norbornene; or,
   [0239] when X is a a norbornene, then R₁ is a monoaryl tetrazine; or,
   [0240] when X is a an aldehyde, then R₁ is a hydroxylamine or a hydrazine or NH₂—NH—C(═O)—; or,
   [0241] when X is a a ketone, then R₁ is a hydroxylamine or a hydrazine or NH₂—NH—C(═O)—; or,
   [0242] when X is a a hydroxylamine, then R₁ is an aldehyde or a ketone; or,
   [0243] when X is a a hydrazine, then R₁ is an aldehyde or a ketone; or,
   [0244] when X is a NH₂—NH—C(═O)—, then R₁ is an aldehyde or a ketone; or,
   [0245] when X is a a haloacetamide, then R₁ is a thiol; or,
   [0246] when X is a a maleimide, then R₁ is a thiol;
[0247] thereby the terminal group is attached to the peptide tag by a linker having the structure according to Formula (II-d):

[chemical structure]

[0248] where the * denotes the phosphopantetheinyl moiety is attached to the peptide tag, and wherein L₁, A₂, X₂, L₃, L₄, R₂, PG and TG are as defined herein.
   Another aspect provided herein is the preparation of an immunoconjugate by a process comprising the steps of:
[0249] (a) providing a modified antibody or fragment thereof, wherein the modified antibody or fragment thereof comprises a peptide tag, and wherein the peptide tag is a substrate of an enzyme having phosphopantetheinyl transferase activity;
[0250] (b) labeling the modified antibody or fragment thereof with a terminal group (TG) by incubating the modified antibody or fragment thereof with an enzyme having phosphopantetheinyl transferase activity in the presence of a compound of Formula (K),

[chemical structure]

[0251] thereby attaching a protected phosphopentathienyl group of Formula (J-a) to the peptide tag,

[chemical structure]

[0252] wherein R₁—PG is a protected functional group R₁;
[0253] (c) deprotecting the protected phosphopentathienyl group to give an activated phosphopentathienyl group of Formula (F-a) attached to the peptide tag,

[chemical structure]

[0254] wherein R₁ is a functional group;
[0255] and
[0256] (d) reacting the functional group R₁ of the activated phosphopentathienyl group with a compound of Formula (II-e),

X-L₄-TG Formula (II-e)
[0257] wherein X is a group which reacts with functional group R₁, wherein:
   [0258] when X is a thiol, then R₁ is a thiol, a maleimide or a haloacetamide; or,
   [0259] when X is a an azide, then R₁ is an alkyne, a triaryl phosphine, a cyclooctene or an oxanobornadiene; or,
   [0260] when X is a a triaryl phosphine, then R₁ is an azide; or,
   [0261] when X is a an oxanobornadiene, then R₁ is an azide; or,
   [0262] when X is a an alkyne, then R₁ is an azide; or,
   [0263] when X is a an alkene, then R₁ is an azide; or,
   [0264] when X is a a cyclooctene, then R₁ is a diaryl tetrazine; or,
   [0265] when X is a a diaryl tetrazine, then R₁ is a cyclooctene; or,
   [0266] when X is a a monoaryl tetrazine, then R₁ is a norbornene; or,
   [0267] when X is a a norbornene, then R₁ is a monoaryl tetrazine; or,
   [0268] when X is a an aldehyde, then R₁ is a hydroxylamine or a hydrazine or NH₂—NH—C(═O)—; or,
   [0269] when X is a a ketone, then R₁ is a hydroxylamine or a hydrazine or NH₂—NH—C(═O)—; or,
   [0270] when X is a a hydroxylamine, then R₁ is an aldehyde or a ketone; or,
   [0271] when X is a a hydrazine, then R₁ is an aldehyde or a ketone; or,
   [0272] when X is a NH₂—NH—C(═O)—, then R₁ is an aldehyde or a ketone; or,
   [0273] when X is a a haloacetamide, then R₁ is a thiol; or,
   [0274] when X is a a maleimide, then R₁ is a thiol;
[0275] thereby the terminal group is attached to the peptide tag by a linker having the structure according to Formula (II-f):

[chemical structure]

[0276] where the * denotes the phosphopantetheinyl moiety is attached to the peptide tag, and wherein L₁, L₂, A₃, X₂, L₄, R₂, PG and TG are as defined herein.
   Another aspect provided herein is the preparation of an immunoconjugate by a process comprising the steps of:
[0277] (a) providing a modified antibody or fragment thereof, wherein the modified antibody or fragment thereof comprises a peptide tag, and wherein the peptide tag is a substrate of an enzyme having phosphopantetheinyl transferase activity;
[0278] (b) labeling the modified antibody or fragment thereof with a terminal group (TG) by incubating the modified antibody or fragment thereof with an enzyme having phosphopantetheinyl transferase activity in the presence of a compound of Formula (L),

[chemical structure]

[0279] thereby attaching a protected phosphopentathienyl group of Formula (L-a) to the peptide tag,

[chemical structure]

[0280] wherein R₁—PG is a protected functional group R₁;
[0281] (c) deprotecting the protected phosphopentathienyl group to give an activated phosphopentathienyl group of Formula (G-a) attached to the peptide tag,

[chemical structure]

[0282] wherein R₁ is a functional group;
[0283] and
[0284] (d) reacting the functional group R₁ of the activated phosphopentathienyl group with a compound of Formula (II-g),

X-TG Formula (II-g)
[0285] wherein X is a group which reacts with functional group R₁, wherein:
   [0286] when X is a thiol, then R₁ is a thiol, a maleimide or a haloacetamide; or,
   [0287] when X is a an azide, then R₁ is an alkyne, a triaryl phosphine, a cyclooctene or an oxanobornadiene; or,
   [0288] when X is a a triaryl phosphine, then R₁ is an azide; or,
   [0289] when X is a an oxanobornadiene, then R₁ is an azide; or,
   [0290] when X is a an alkyne, then R₁ is an azide; or,
   [0291] when X is a an alkene, then R₁ is an azide; or,
   [0292] when X is a a cyclooctene, then R₁ is a diaryl tetrazine; or,
   [0293] when X is a a diaryl tetrazine, then R₁ is a cyclooctene; or,
   [0294] when X is a a monoaryl tetrazine, then R₁ is a norbornene; or,
   [0295] when X is a a norbornene, then R₁ is a monoaryl tetrazine; or,
   [0296] when X is a an aldehyde, then R₁ is a hydroxylamine or a hydrazine or NH₂—NH—C(═O)—; or,
   [0297] when X is a a ketone, then R₁ is a hydroxylamine or a hydrazine or NH₂—NH—C(═O)—; or,
   [0298] when X is a a hydroxylamine, then R₁ is an aldehyde or a ketone; or,
   [0299] when X is a a hydrazine, then R₁ is an aldehyde or a ketone; or,
   [0300] when X is a NH₂—NH—C(═O)—, then R₁ is an aldehyde or a ketone; or,
   [0301] when X is a a haloacetamide, then R₁ is a thiol; or,
   [0302] when X is a a maleimide, then R₁ is a thiol;
[0303] thereby the terminal group is attached to the peptide tag by a linker having the structure according to Formula (II-h):

[chemical structure]

[0304] where the * denotes the phosphopantetheinyl moiety is attached to the peptide tag, and wherein L₁, L₂, L₃, A₄, X₂, R₂, PG and TG are as defined herein

[0305] In certain embodiments of the above methods of preparation
[0306] A₁ is —C(═O)NH—, —NHC(═O)—, —C(═O)NH(CH₂)ₙ—, —C(═O)NH(C(R⁴)₂)ₙ—, —(O(CH₂)ₙ)ₘ—, —(O(C(R⁴)₂)ₙ)ₘ—, —((CH₂)ₙO)ₘ—, —(((C(R⁴)₂)ₙO)ₘ—, —((CH₂)ₙO)ₘ(CH₂)ₙ—, —(((C(R⁴)₂)ₙO)ₘC(R⁴)₂)ₙ—, —(CH₂)ₙC(═O)NH—, —(C(R⁴)₂)ₙC(═O)NH—, —(CH₂)ₙNHC(═O)—, —(C(R⁴)₂)ₙNHC(═O)—, —NHC(═O)(CH₂)ₙ—, —NHC(═O)(C(R⁴)₂)ₙ—, —C(═O)NH(CH₂)ₙS—, —C(═O)NH(C(R⁴)₂)ₙS—, —S(CH₂)ₙC(═O)NH—, —S(C(R⁴)₂)ₙC(═O)NH—, —C(═O)NH(CH₂)ₙNHC(═O)(CH₂)ₙ—, —C(═O)NH(C(R⁴)₂)ₙNHC(═O)(C(R⁴)₂)ₙ—, —C(═O)(CH₂)ₙ—, —C(═O)(C(R⁴)₂)ₙ—, —(CH₂)ₙC(═O)—, —(C(R⁴)₂)ₙC(═O)—, —(CH₂)ₙ(O(CH₂)ₙ)ₘNHC(═O)(CH₂)ₙ—, —(C(R⁴)₂)ₙ(O(C(R⁴)₂)ₙ)ₘNHC(═O)(C(R⁴)₂)ₙ—, —(CH₂)ₙNHC(═O)(CH₂)ₙ—, —(C(R⁴)₂)ₙNHC(═O)(C(R⁴)₂)ₙ—, —(CH₂)ₙNH((CH₂)ₙO)ₘ(CH₂)ₙ—, —(C(R⁴)₂)ₙNH((C(R⁴)₂)ₙO)ₘ(C(R⁴)₂)ₙ—, —(O(CH₂)ₙ)ₘNHC(═O)(CH₂)ₙ—, or —(O(C(R⁴)₂)ₙ)ₘNHC(═O)(C(R⁴)₂)ₙ—;
[0307] L₂ is a bond, -A₂-, or -A₂X²—;
[0308] L₃ is a bond, -A₃-, or -A₃X²—;
[0309] L₄ is a bond, -A₄-, -A₄X²—,

[chemical structure]

[chemical structure]

[0310] A₂ is —C(═O)NH—, —C(═O)NH(CH₂)ₙ—, —C(═O)NH(C(R⁴)₂)ₙ—, —(O(CH₂)ₙ)ₘ—, —(O(C(R⁴)₂)ₙ)ₘ—, —((CH₂)ₙO)ₘ—, —(((C(R⁴)₂)ₙO)ₘ—, —((CH₂)ₙO)ₘ(CH₂)ₙ—, —(((C(R⁴)₂)ₙO)ₘC(R⁴)₂)ₙ—, —(CH₂)ₙC(═O)NH—, —(C(R⁴)₂)ₙC(═O)NR⁴—, —(CH₂)ₙNHC(═O)—, —(C(R⁴)₂)ₙNHC(═O)—, —NHC(═O)(CH₂)ₙ—, —NHC(═O)(C(R⁴)₂)ₙ—, —C(═O)NH(CH₂)ₙS—, —C(═O)NH(C(R⁴)₂)ₙS—, —S(CH₂)ₙC(═O)NH—, —S(C(R⁴)₂)ₙC(═O)NH—, —(CH₂)ₙS—, —(C(R⁴)₂)ₙS—, —S(CH₂)ₙ—, —S(C(R⁴)₂)ₙ—, —(CH₂)ₙNH—, —(C(R⁴)₂)ₙNH—, —C(═O)NH(CH₂)ₙNHC(═O)(CH₂)ₙ—, —C(═O)NH(C(R⁴)₂)ₙNHC(═O)(C(R⁴)₂)ₙ—, —C(═O)(CH₂)ₙ—, —C(═O)(C(R⁴)₂)ₙ—, —(CH₂)ₙC(═O)—, —(C(R⁴)₂)ₙC(═O)—, —(CH₂)ₙ(O(CH₂)ₙ)ₘNHC(═O)(CH₂)ₙ—, —(C(R⁴)₂)ₙ(O(C(R⁴)₂)ₙ)ₘNHC(═O)(C(R⁴)₂)ₙ—, —(CH₂)ₙ(O(CH₂)ₙ)ₘOC(═O)NH(CH₂)ₙ—, —(C(R⁴)₂)ₙ(O(C(R⁴)₂)ₙ)ₘOC(═O)NH(C(R⁴)₂)ₙ—, —(CH₂)ₙNHC(═O)(CH₂)ₙ—, —(C(R⁴)₂)ₙNHC(═O)(C(R⁴)₂)ₙ—, —(CH₂)ₙNH((CH₂)ₙO)ₘ(CH₂)ₙ—, —(C(R⁴)₂)ₙNH((C(R⁴)₂)ₙO)ₘ(C(R⁴)₂)ₙ—, —(O(CH₂)ₙ)ₘNHC(═O)(CH₂)ₙ—, —(O(C(R⁴)₂)ₙ)ₘNHC(═O)(C(R⁴)₂)ₙ—,

[chemical structure]

[0311] A₃ is —C(═O)NH—, —C(═O)NH(CH₂)ₙ—, —C(═O)NH(C(R⁴)₂)ₙ—, —(O(CH₂)ₙ)ₘ—, —(O(C(R⁴)₂)ₙ)ₘ—, —((CH₂)ₙO)ₘ, —(((C(R⁴)₂)ₙO)ₘ, —((CH₂)ₙO)ₘ(CH₂)ₙ—, —(((C(R⁴)₂)ₙO)ₘC(R⁴)₂)ₙ—, —(CH₂)ₙC(═O)NH—, —(C(R⁴)₂)ₙC(═O)NH—, —(CH₂)ₙNHC(═O)—, —(C(R⁴)₂)ₙNHC(═O)—, —NHC(═O)(CH₂)ₙ—, —NHC(═O)(C(R⁴)₂)ₙ—, —C(═O)NH(CH₂)ₙS—, —C(═O)NH(C(R⁴)₂)ₙS—, —S(CH₂)ₙC(═O)NH—, —S(C(R⁴)₂)ₙC(═O)NH—, —(CH₂)ₙS—, —(C(R⁴)₂)ₙS—, —S(CH₂)ₙ—, —S(C(R⁴)₂)ₙ—, —C(═O)NH(CH₂)ₙNHC(═O)(CH₂)ₙ—, —C(═O)NH(C(R⁴)₂)ₙNHC(═O)(C(R⁴)₂)ₙ—, —C(═O)(CH₂)ₙ—, —C(═O)(C(R⁴)₂)ₙ—, —(CH₂)ₙC(═O)—, —(C(R⁴)₂)ₙC(═O)—, —(CH₂)ₙ(O(CH₂)ₙ)ₘNHC(═O)(CH₂)ₙ—, —(C(R⁴)₂)ₙ(O(C(R⁴)₂)ₙ)ₘNHC(═O)(C(R⁴)₂)ₙ—, —(CH₂)ₙ(O(CH₂)ₙ)ₘOC(═O)NH(CH₂)ₙ—, —(C(R⁴)₂)ₙ(O(C(R⁴)₂)ₙ)ₘOC(═O)NH(C(R⁴)₂)ₙ—, —(CH₂)ₙ(O(CH₂)ₙ)ₘOC(═O)—, —(C(R⁴)₂)ₙ(O(C(R⁴)₂)ₙ)ₘOC(═O)—, —(CH₂)ₙ(O(CH₂)ₙ)ₘOC(═O)—, —(C(R⁴)₂)ₙ(O(C(R⁴)₂)ₙ)ₘOC(═O)—, —(CH₂)ₙNHC(═O)(CH₂)ₙ—, —(C(R⁴)₂)ₙNHC(═O)(C(R⁴)₂)ₙ—, —(O(CH₂)ₙ)ₘNHC(═O)(CH₂)ₙ—, —(O(C(R⁴)₂)ₙ)ₘNHC(═O)(C(R⁴)₂)ₙ—,

[chemical structure]

[0312] A₄ is —C(═O)NH—, —C(═O)NH(CH₂)ₙ—, —C(═O)NH(C(R⁴)₂)ₙ—, —(O(CH₂)ₙ)ₘ—, —(O(C(R⁴)₂)ₙ)ₘ—, —((CH₂)ₙO)ₘ—, —(((C(R⁴)₂)ₙO)ₘ—, —((CH₂)ₙO)ₘ(CH₂)ₙ—, —(((C(R⁴)₂)ₙO)ₘC(R⁴)₂)ₙ—, —(CH₂)ₙC(═O)NH—, —(C(R⁴)₂)ₙC(═O)NH—, —(CH₂)ₙNHC(═O)—, —(C(R⁴)₂)ₙNHC(═O)—, —NHC(═O)(CH₂)ₙ—, —NHC(═O)(C(R⁴)₂)ₙ—, —C(═O)NH(CH₂)ₙS—, —C(═O)NH(C(R⁴)₂)ₙS—, —S(CH₂)ₙC(═O)NH—, —S(C(R⁴)₂)ₙC(═O)NH—, —C(═O)NH(CH₂)ₙNHC(═O)(CH₂)ₙ—, —C(═O)NH(C(R⁴)₂)ₙNHC(═O)(C(R⁴)₂)ₙ—, —C(═O)(CH₂)ₙ—, —C(═O)(C(R⁴)₂)ₙ—, —(CH₂)ₙC(═O)—, —(C(R⁴)₂)ₙC(═O)—, —(CH₂)ₙ(O(CH₂)ₙ)ₘNHC(═O)(CH₂)ₙ—, —(C(R⁴)₂)ₙ(O(C(R⁴)₂)ₙ)ₘNHC(═O)(C(R⁴)₂)ₙ—, —(CH₂)ₙNHC(═O)(CH₂)ₙ—, —(C(R⁴)₂)ₙNHC(═O)(C(R⁴)₂)ₙ—, —(CH₂)ₙNH((CH₂)ₙO)ₘ(CH₂)ₙ—, —(C(R⁴)₂)ₙNH((C(R⁴)₂)ₙO)ₘ(C(R⁴)₂)ₙ—, —(O(CH₂)ₙ)ₘNHC(═O)(CH₂)ₙ—, or —(O(C(R⁴)₂)ₙ)ₘNHC(═O)(C(R⁴)₂)ₙ—;
[0313] each X² is independently selected from a bond,

[chemical structure]

[chemical structure]

[chemical structure]

—S—, —Si(OH)₂O—,

[chemical structure]

CHR⁴(CH₂)ₙC(═O)NH—, —CHR⁴(CH₂)ₙNHC(═O)—, —C(═O)NH— and —NHC(═O)—;
[0314] each R⁴ is independently selected from H, C₁₋₄alkyl, —C(═O)OH and —OH,
[0315] each R⁵ is independently selected from H, C₁₋₄alkyl, phenyl or C₁₋₄alkyl substituted with 1 to 3 —OH groups;
[0316] each R⁶ is independently selected from H, fluoro, benzyloxy substituted with —C(═O)OH, benzyl substituted with —C(═O)OH, C₁₋₄alkoxy substituted with —C(═O)OH and C₁₋₄alkyl substituted with —C(═O)OH;
[0317] R⁷ is independently selected from H, phenyl and pyridine;
[0318] R⁸ is independently selected from

[chemical structure]

[0319] R⁹ is independently selected from H and C₁₋₆haloalkyl;
[0320] each n is independently selected from 1, 2, 3, 4, 5, 6, 7, 8 and 9;
[0321] each m is independently selected from 1, 2, 3, 4, 5, 6, 7, 8 and 9, and
[0322] TG is selected from a drug moiety, an affinity probe, a chelator, a spectroscopic probe, a radioactive probe, a lipid molecule, a polyethylene glycol, a polymer, a nanoparticle, a quantum dot, a liposome, a PLGA particle, and a polysaccharide.

[0323] In other embodiments of the above methods of preparation
[0324] A₁ is —C(═O)NH—, —C(═O)NH(CH₂)ₙ—, —C(═O)NH(CH₂)ₙS—, —(O(CH₂)ₙ)ₘ—, —((CH₂)ₙO)ₘ(CH₂)ₙ—, —NHC(═O)(CH₂)ₙ—, —(CH₂)ₙNHC(═O)—, —C(═O)NH(CH₂)ₙNHC(═O)(CH₂)ₙ—, —(CH₂)ₙNH((CH₂)ₙO)ₘ(CH₂)ₙ— or —(O(CH₂)ₙ)ₘNHC(═O)(CH₂)ₙ—;
[0325] L₂ is a bond, -A₂-, or -A₂X²—;
[0326] L₃ is a bond, -A₃-, or -A₃X²—;
[0327] L₄ is a bond, -A₄-, -A₄X²—,

[chemical structure]

[chemical structure]

[0328] A₁ is —C(═O)NH—, —C(═O)NH(CH₂)ₙ—, —C(═O)NH(CH₂)ₙS—, —(O(CH₂)ₙ)ₘ—, —((CH₂)ₙO)ₘ(CH₂)ₙ—, —NHC(═O)(CH₂)ₙ—, —(CH₂)ₙNHC(═O)—, —C(═O)NH(CH₂)ₙNHC(═O)(CH₂)ₙ—, —(CH₂)ₙNH((CH₂)ₙO)ₘ(CH₂)ₙ— or —(O(CH₂)ₙ)ₘNHC(═O)(CH₂)ₙ—;
[0329] A₂ is —C(═O)NH—, —C(═O)NH(CH₂)ₙ—, —C(═O)NH(CH₂)ₙS—, —(O(CH₂)ₙ)ₘ—, —((CH₂)ₙO)ₘ(CH₂)ₙ—, —NHC(═O)(CH₂)ₙ—, —(CH₂)ₙNHC(═O)—, —C(═O)NH(CH₂)ₙNHC(═O)(CH₂)ₙ—, —(CH₂)ₙNH((CH₂)ₙO)ₘ(CH₂)ₙ—, —(O(CH₂)ₙ)ₘNHC(═O)(CH₂)ₙ— or

[chemical structure]

[0330] A₃ is —C(═O)NH—, —C(═O)NH(CH₂)ₙ—, —C(═O)NH(CH₂)ₙS—, —(O(CH₂)ₙ)ₘ—, —((CH₂)ₙO)ₘ(CH₂)ₙ—, —NHC(═O)(CH₂)ₙ—, —(CH₂)ₙNHC(═O)—, —C(═O)NH(CH₂)ₙNHC(═O)(CH₂)ₙ—, —(CH₂)ₙNH((CH₂)ₙO)ₘ(CH₂)ₙ—, —(O(CH₂)ₙ)ₘNHC(═O)(CH₂)ₙ— or

[chemical structure]

[0331] A₄ is —C(═O)NH—, —C(═O)NH(CH₂)ₙ—, —C(═O)NH(CH₂)ₙS—, —(O(CH₂)ₙ)ₘ—, —((CH₂)ₙO)ₘ(CH₂)ₙ—, —NHC(═O)(CH₂)ₙ—, —(CH₂)ₙNHC(═O)—, —C(═O)NH(CH₂)ₙNHC(═O)(CH₂)ₙ—, —(CH₂)ₙNH((CH₂)ₙO)ₘ(CH₂)ₙ— or —(O(CH₂)ₙ)ₘNHC(═O)(CH₂)ₙ—;
[0332] each X² is independently selected from a bond,

[chemical structure]

[chemical structure]

[chemical structure]

—S—, —Si(OH)₂O—,

[chemical structure]

—CHR⁴(CH₂)ₙC(═O)NH—, —CHR⁴(CH₂)ₙNHC(═O)—, —C(═O)NH— and —NHC(═O)—;
[0333] each R⁴ is independently selected from H, C₁₋₄alkyl, —C(═O)OH and —OH,
[0334] each R⁵ is independently selected from H, C₁₋₄alkyl, phenyl or C₁₋₄alkyl substituted with 1 to 3 —OH groups;
[0335] each R⁶ is independently selected from H, fluoro, benzyloxy substituted with —C(═O)OH, benzyl substituted with —C(═O)OH, C₁₋₄alkoxy substituted with —C(═O)OH and C₁₋₄alkyl substituted with —C(═O)OH;
[0336] R⁷ is independently selected from H, phenyl and pyridine;
[0337] R⁸ is independently selected from

[chemical structure]

[0338] R⁹ is independently selected from H and C₁₋₆haloalkyl;
[0339] each n is independently selected from 1, 2, 3, 4, 5, 6, 7, 8 and 9, and
[0340] each m is independently selected from 1, 2, 3, 4, 5, 6, 7, 8 and 9.
   In other embodiments of the above methods of preparation
[0341] L₁ is a bond, -A₁-, -A₁X²— or —X²—;
[0342] L₃ is a bond, -A₃-, or -A₃X²—;
[0343] L₄ is a bond, -A₄-, -A₄X²—,

[chemical structure]

[chemical structure]

[0344] A₁ is —C(═O)NH—, —C(═O)NH(CH₂)ₙ—, —C(═O)NH(CH₂)ₙS—, —(O(CH₂)ₙ)ₘ—, —((CH₂)ₙO)ₘ(CH₂)ₙ—, —NHC(═O)(CH₂)ₙ—, —(CH₂)ₙNHC(═O)—, —C(═O)NH(CH₂)ₙNHC(═O)(CH₂)ₙ—, —(CH₂)ₙNH((CH₂)ₙO)ₘ(CH₂)ₙ— or —(O(CH₂)ₙ)ₘNHC(═O)(CH₂)ₙ—;
[0345] A₂ is —C(═O)NH—, —C(═O)NH(CH₂)ₙ—, —C(═O)NH(CH₂)ₙS—, —(O(CH₂)ₙ)ₘ—, —((CH₂)ₙO)ₘ(CH₂)ₙ—, —NHC(═O)(CH₂)ₙ—, —(CH₂)ₙNHC(═O)—, —C(═O)NH(CH₂)ₙNHC(═O)(CH₂)ₙ—, —(CH₂)ₙNH((CH₂)ₙO)ₘ(CH₂)ₙ—, —(O(CH₂)ₙ)ₘNHC(═O)(CH₂)ₙ— or

[chemical structure]

[0346] A₃ is —C(═O)NH—, —C(═O)NH(CH₂)ₙ—, —C(═O)NH(CH₂)ₙS—, —(O(CH₂)ₙ)ₘ—, —((CH₂)ₙO)ₘ(CH₂)ₙ—, —NHC(═O)(CH₂)ₙ—, —(CH₂)ₙNHC(═O)—, —C(═O)NH(CH₂)ₙNHC(═O)(CH₂)ₙ—, —(CH₂)ₙNH((CH₂)ₙO)ₘ(CH₂)ₙ—, —(O(CH₂)ₙ)ₘNHC(═O)(CH₂)ₙ— or

[chemical structure]

[0347] A₄ is —C(═O)NH—, —C(═O)NH(CH₂)ₙ—, —C(═O)NH(CH₂)ₙS—, —(O(CH₂)ₙ)ₘ—, —((CH₂)ₙO)ₘ(CH₂)ₙ—, —NHC(═O)(CH₂)ₙ—, —(CH₂)ₙNHC(═O)—, —C(═O)NH(CH₂)ₙNHC(═O)(CH₂)ₙ—, —(CH₂)ₙNH((CH₂)ₙO)ₘ(CH₂)ₙ— or —(O(CH₂)ₙ)ₘNHC(═O)(CH₂)ₙ—;
[0348] each X² is independently selected from a bond,

[chemical structure]

[chemical structure]

[chemical structure]

—S—, —Si(OH)₂O—,

[chemical structure]

—CHR⁴(CH₂)ₙC(═O)NH—, —CHR⁴(CH₂)ₙNHC(═O)—, —C(═O)NH— and —NHC(═O)—;
[0349] each R⁴ is independently selected from H, C₁₋₄alkyl, —C(═O)OH and —OH,
[0350] each R⁵ is independently selected from H, C₁₋₄alkyl, phenyl or C₁₋₄alkyl substituted with 1 to 3 —OH groups;
[0351] each R⁶ is independently selected from H, fluoro, benzyloxy substituted with —C(═O)OH, benzyl substituted with —C(═O)OH, C₁₋₄alkoxy substituted with —C(═O)OH and C₁₋₄alkyl substituted with —C(═O)OH;
[0352] R⁷ is independently selected from H, phenyl and pyridine;
[0353] R⁸ is independently selected from

[chemical structure]

[0354] R⁹ is independently selected from H and C₁₋₆haloalkyl;
[0355] each n is independently selected from 1, 2, 3, 4, 5, 6, 7, 8 and 9, and
[0356] each m is independently selected from 1, 2, 3, 4, 5, 6, 7, 8 and 9.

[0357] Another aspect provided herein are conjugated antibodies or antibody fragment thereof, comprising the modified antibody or antibody fragment provided herein, wherein a serine residue of the peptide tag in the modified antibody or antibody fragment thereof is conjugated to a 4′-phosphopantetheine group having the structure of Formula (D-a), Formula (E-a), Formula (F-a) or Formula (G-a):

[chemical structure]

wherein:
[0358] L₁ is -A₁X²— or —X²—;
[0359] L₂ is a bond, -A₂-, or -A₂X²—;
[0360] L₃ is a bond, -A₃-, or -A₃X²—;
[0361] L₄ is a bond, -A₄-, -A₄X²—,

[chemical structure]

[chemical structure]

[0362] A₁ is —C(═O)NH—, —NHC(═O)—, —C(═O)NH(CH₂)ₙ—, —C(═O)NH(C(R⁴)₂)ₙ—, —(O(CH₂)ₙ)ₘ—, —(O(C(R⁴)₂)ₙ)ₘ—, —((CH₂)ₙO)ₘ—, —(((C(R⁴)₂)ₙO)ₘ—, —((CH₂)ₙO)ₘ(CH₂)ₙ—, —(((C(R⁴)₂)ₙO)ₘC(R⁴)₂)ₙ—, —(CH₂)ₙC(═O)NH—, —(C(R⁴)₂)ₙC(═O)NH—, —(CH₂)ₙNHC(═O)—, —(C(R⁴)₂)ₙNHC(═O)—, —NHC(═O)(CH₂)ₙ—, —NHC(═O)(C(R⁴)₂)ₙ—, —C(═O)NH(CH₂)ₙS—, —C(═O)NH(C(R⁴)₂)ₙS—, —S(CH₂)ₙC(═O)NH—, —S(C(R⁴)₂)ₙC(═O)NH—, —C(═O)NH(CH₂)ₙNHC(═O)(CH₂)ₙ—, —C(═O)NH(C(R⁴)₂)ₙNHC(═O)(C(R⁴)₂)ₙ—, —C(═O)(CH₂)ₙ—, —C(═O)(C(R⁴)₂)ₙ—, —(CH₂)ₙC(═O)—, —(C(R⁴)₂)ₙC(═O)—, —(CH₂)ₙ(O(CH₂)ₙ)ₘNHC(═O)(CH₂)ₙ—, —(C(R⁴)₂)ₙ(O(C(R⁴)₂)ₙ)ₘNHC(═O)(C(R⁴)₂)ₙ—, —(CH₂)ₙNHC(═O)(CH₂)ₙ—, —(C(R⁴)₂)ₙNHC(═O)(C(R⁴)₂)ₙ—, —(CH₂)ₙNH((CH₂)ₙO)ₘ(CH₂)ₙ—, —(C(R⁴)₂)ₙNH((C(R⁴)₂)ₙO)ₘ(C(R⁴)₂)ₙ—, —(O(CH₂)ₙ)ₘNHC(═O)(CH₂)ₙ—, or —(O(C(R⁴)₂)ₙ)ₘNHC(═O)(C(R⁴)₂)ₙ—;
[0363] A₂ is —C(═O)NH—, —C(═O)NH(CH₂)ₙ—, —C(═O)NH(C(R⁴)₂)ₙ—, —(O(CH₂)ₙ)ₘ—, —(O(C(R⁴)₂)ₙ)ₘ—, —((CH₂)ₙO)ₘ—, —(((C(R⁴)₂)ₙO)ₘ—, —((CH₂)ₙO)ₘ(CH₂)ₙ—, —(((C(R⁴)₂)ₙO)ₘC(R⁴)₂)ₙ—, —(CH₂)ₙC(═O)NH—, —(C(R⁴)₂)ₙC(═O)NR⁴—, —(CH₂)ₙNHC(═O)—, —(C(R⁴)₂)ₙNHC(═O)—, —NHC(═O)(CH₂)ₙ—, —NHC(═O)(C(R⁴)₂)ₙ—, —C(═O)NH(CH₂)ₙS—, —C(═O)NH(C(R⁴)₂)ₙS—, —S(CH₂)ₙC(═O)NH—, —S(C(R⁴)₂)ₙC(═O)NH—, —(CH₂)ₙS—, —(C(R⁴)₂)ₙS—, —S(CH₂)ₙ—, —S(C(R⁴)₂)ₙ—, —(CH₂)ₙNH—, —(C(R⁴)₂)ₙNH—, —C(═O)NH(CH₂)ₙNHC(═O)(CH₂)ₙ—, —C(═O)NH(C(R⁴)₂)ₙNHC(═O)(C(R⁴)₂)ₙ—, —C(═O)(CH₂)ₙ—, —C(═O)(C(R⁴)₂)ₙ—, —(CH₂)ₙC(═O)—, —(C(R⁴)₂)ₙC(═O)—, —(CH₂)ₙ(O(CH₂)ₙ)ₘNHC(═O)(CH₂)ₙ—, —(C(R⁴)₂)ₙ(O(C(R⁴)₂)ₙ)ₘNHC(═O)(C(R⁴)₂)ₙ—, —(CH₂)ₙ(O(CH₂)ₙ)ₘOC(═O)NH(CH₂)ₙ—, —(C(R⁴)₂)ₙ(O(C(R⁴)₂)ₙ)ₘOC(═O)NH(C(R⁴)₂)ₙ—, —(CH₂)ₙNHC(═O)(CH₂)ₙ—, —(C(R⁴)₂)ₙNHC(═O)(C(R⁴)₂)ₙ—, —(CH₂)ₙNH((CH₂)ₙO)ₘ(CH₂)ₙ—, —(C(R⁴)₂)ₙNH((C(R⁴)₂)ₙO)ₘ(C(R⁴)₂)ₙ—, —(O(CH₂)ₙ)ₘNHC(═O)(CH₂)ₙ—, —(O(C(R⁴)₂)ₙ)ₘNHC(═O)(C(R⁴)₂)ₙ—,

[chemical structure]

[0364] A₃ is —C(═O)NH—, —C(═O)NH(CH₂)ₙ—, —C(═O)NH(C(R⁴)₂)ₙ—, —(O(CH₂)ₙ)ₘ—, —(O(C(R⁴)₂)ₙ)ₘ—, —((CH₂)ₙO)ₘ—, —(((C(R⁴)₂)ₙO)ₘ—, —((CH₂)ₙO)ₘ(CH₂)ₙ—, —(((C(R⁴)₂)ₙO)ₘC(R⁴)₂)ₙ—, —(CH₂)ₙC(═O)NH—, —(C(R⁴)₂)ₙC(═O)NH—, —(CH₂)ₙNHC(═O)—, —(C(R⁴)₂)ₙNHC(═O)—, —NHC(═O)(CH₂)ₙ—, —NHC(═O)(C(R⁴)₂)ₙ—, —C(═O)NH(CH₂)ₙS—, —C(═O)NH(C(R⁴)₂)ₙS—, —S(CH₂)ₙC(═O)NH—, —S(C(R⁴)₂)ₙC(═O)NH—, —(CH₂)ₙS—, —(C(R⁴)₂)ₙS—, —S(CH₂)ₙ—, —S(C(R⁴)₂)ₙ—, —C(═O)NH(CH₂)ₙNHC(═O)(CH₂)ₙ—, —C(═O)NH(C(R⁴)₂)ₙNHC(═O)(C(R⁴)₂)ₙ—, —C(═O)(CH₂)ₙ—, —C(═O)(C(R⁴)₂)ₙ—, —(CH₂)ₙC(═O)—, —(C(R⁴)₂)ₙC(═O)—, —(CH₂)ₙ(O(CH₂)ₙ)ₘNHC(═O)(CH₂)ₙ—, —(C(R⁴)₂)ₙ(O(C(R⁴)₂)ₙ)ₘNHC(═O)(C(R⁴)₂)ₙ—, —(CH₂)ₙ(O(CH₂)ₙ)ₘOC(═O)NH(CH₂)ₙ—, —(C(R⁴)₂)ₙ(O(C(R⁴)₂)ₙ)ₘOC(═O)NH(C(R⁴)₂)ₙ—, —(CH₂)ₙ(O(CH₂)ₙ)ₘOC(═O)—, —(C(R⁴)₂)ₙ(O(C(R⁴)₂)ₙ)ₘOC(═O)—, —(CH₂)ₙ(O(CH₂)ₙ)ₘOC(═O)—, —(C(R⁴)₂)ₙ(O(C(R⁴)₂)ₙ)ₘOC(═O)—, —(CH₂)ₙNHC(═O)(CH₂)ₙ—, —(C(R⁴)₂)ₙNHC(═O)(C(R⁴)₂)ₙ—, —(O(CH₂)ₙ)ₘNHC(═O)(CH₂)ₙ—, —(O(C(R⁴)₂)ₙ)ₘNHC(═O)(C(R⁴)₂)ₙ—,

[chemical structure]

[0365] A₄ is —C(═O)NH—, —C(═O)NH(CH₂)ₙ—, —C(═O)NH(C(R⁴)₂)ₙ—, —(O(CH₂)ₙ)ₘ—, —(O(C(R⁴)₂)ₙ)ₘ—, —((CH₂)ₙO)ₘ—, —(((C(R⁴)₂)ₙO)ₘ—, —((CH₂)ₙO)ₘ(CH₂)ₙ—, —(((C(R⁴)₂)ₙO)ₘC(R⁴)₂)ₙ—, —(CH₂)ₙC(═O)NH—, —(C(R⁴)₂)ₙC(═O)NH—, —(CH₂)ₙNHC(═O)—, —(C(R⁴)₂)ₙNHC(═O)—, —NHC(═O)(CH₂)ₙ—, —NHC(═O)(C(R⁴)₂)ₙ—, —C(═O)NH(CH₂)ₙS—, —C(═O)NH(C(R⁴)₂)ₙS—, —S(CH₂)ₙC(═O)NH—, —S(C(R⁴)₂)ₙC(═O)NH—, —C(═O)NH(CH₂)ₙNHC(═O)(CH₂)ₙ—, —C(═O)NH(C(R⁴)₂)ₙNHC(═O)(C(R⁴)₂)ₙ—, —C(═O)(CH₂)ₙ—, —C(═O)(C(R⁴)₂)ₙ—, —(CH₂)ₙC(═O)—, —(C(R⁴)₂)ₙC(═O)—, —(CH₂)ₙ(O(CH₂)ₙ)ₘNHC(═O)(CH₂)ₙ—, —(C(R⁴)₂)ₙ(O(C(R⁴)₂)ₙ)ₘNHC(═O)(C(R⁴)₂)ₙ—, —(CH₂)ₙNHC(═O)(CH₂)ₙ—, —(C(R⁴)₂)ₙNHC(═O)(C(R⁴)₂)ₙ—, —(CH₂)ₙNH((CH₂)ₙO)ₘ(CH₂)ₙ—, —(C(R⁴)₂)ₙNH((C(R⁴)₂)ₙO)ₘ(C(R⁴)₂)ₙ—, —(O(CH₂)ₙ)ₘNHC(═O)(CH₂)ₙ—, or —(O(C(R⁴)₂)ₙ)ₘNHC(═O)(C(R⁴)₂)ₙ—;
[0366] each X² is independently selected from a bond,

[chemical structure]

[chemical structure]

[chemical structure]

—S—, —Si(OH)₂O—,

[chemical structure]

—CHR⁴(CH₂)ₙC(═O)NH—, —CHR⁴(CH₂)ₙNHC(═O)—, —C(═O)NH— and —NHC(═O)—;
[0367] each R⁴ is independently selected from H, C₁₋₄alkyl, —C(═O)OH and —OH,
[0368] each R⁵ is independently selected from H, C₁₋₄alkyl, phenyl or C₁₋₄alkyl substituted with 1 to 3 —OH groups;
[0369] each R⁶ is independently selected from H, fluoro, benzyloxy substituted with —C(═O)OH, benzyl substituted with —C(═O)OH, C₁₋₄alkoxy substituted with —C(═O)OH and C₁₋₄alkyl substituted with —C(═O)OH;
[0370] R⁷ is independently selected from H, phenyl and pyridine;
[0371] R⁹ is independently selected from

[chemical structure]

[0372] R⁹ is independently selected from H and C₁₋₆haloalkyl;
[0373] each n is independently selected from 1, 2, 3, 4, 5, 6, 7, 8 and 9,
[0374] each m is independently selected from 1, 2, 3, 4, 5, 6, 7, 8 and 9, and
[0375] R¹ is a thiol, a maleimide, a haloacetamide, an alkyne, a triaryl phosphine, a cyclooctene, an oxanobornadiene, an azide, a diaryl tetrazine, a norbornene, a monoaryl tetrazine, a hydroxylamine, a hydrazine, NH₂—NH—C(═O)—, an aldehyde or a ketone.
   In certain embodiments of such conjugated antibodies or antibody fragments thereof, the 4′-phosphopantetheine group is

[chemical structure]

In certain embodiments of such conjugated antibodies or antibody fragments thereof, the conjugated serine has a structure selected from:

[chemical structure]

[0376] In other embodiments of such conjugated antibodies or antibody fragments thereof, the conjugated serine is

[chemical structure]

[0377] Another aspect provided herein are conjugated antibodies or antibody fragment thereof, comprising a modified antibody or antibody fragment thereof provided herein, wherein a serine residue of the peptide tag is conjugated to a modified 4′-phosphopantetheine group and the conjugated serine has a structure selected from:

[chemical structure]

wherein
[0378] L₁ is -A₁X²— or —X²—;
[0379] L₂ is a bond, -A₂-, or -A₂X²—;
[0380] L₃ is a bond, -A₃-, or -A₃X²—;
[0381] L₄ is a bond, -A₄-, -A₄X²—,

[chemical structure]

[chemical structure]

[chemical structure]

[0382] A₁ is —C(═O)NH—, —NHC(═O)—, —C(═O)NH(CH₂)ₙ—, —C(═O)NH(C(R⁴)₂)ₙ—, —(O(CH₂)ₙ)ₘ—, —(O(C(R⁴)₂)ₙ)ₘ—, —((CH₂)ₙO)ₘ—, —(((C(R⁴)₂)ₙO)ₘ—, —((CH₂)ₙO)ₘ(CH₂)ₙ—, —(((C(R⁴)₂)ₙO)ₘC(R⁴)₂)ₙ—, —(CH₂)ₙC(═O)NH—, —(C(R⁴)₂)ₙC(═O)NH—, —(CH₂)ₙNHC(═O)—, —(C(R⁴)₂)ₙNHC(═O)—, —NHC(═O)(CH₂)ₙ—, —NHC(═O)(C(R⁴)₂)ₙ—, —C(═O)NH(CH₂)ₙS—, —C(═O)NH(C(R⁴)₂)ₙS—, —S(CH₂)ₙC(═O)NH—, —S(C(R⁴)₂)ₙC(═O)NH—, —C(═O)NH(CH₂)ₙNHC(═O)(CH₂)ₙ—, —C(═O)NH(C(R⁴)₂)ₙNHC(═O)(C(R⁴)₂)ₙ—, —C(═O)(CH₂)ₙ—, —C(═O)(C(R⁴)₂)ₙ—, —(CH₂)ₙC(═O)—, —(C(R⁴)₂)ₙC(═O)—, —(CH₂)ₙ(O(CH₂)ₙ)ₘNHC(═O)(CH₂)ₙ—, —(C(R⁴)₂)ₙ(O(C(R⁴)₂)ₙ)ₘNHC(═O)(C(R⁴)₂)ₙ—, —(CH₂)ₙNHC(═O)(CH₂)ₙ—, —(C(R⁴)₂)ₙNHC(═O)(C(R⁴)₂)ₙ—, —(CH₂)ₙNH((CH₂)ₙO)ₘ(CH₂)ₙ—, —(C(R⁴)₂)ₙNH((C(R⁴)₂)ₙO)ₘ(C(R⁴)₂)ₙ—, —(O(CH₂)ₙ)ₘNHC(═O)(CH₂)ₙ—, or —(O(C(R⁴)₂)ₙ)ₘNHC(═O)(C(R⁴)₂)ₙ—;
[0383] A₂ is —C(═O)NH—, —C(═O)NH(CH₂)ₙ—, —C(═O)NH(C(R⁴)₂)ₙ—, —(O(CH₂)ₙ)ₘ—, —(O(C(R⁴)₂)ₙ)ₘ—, —((CH₂)ₙO)ₘ—, —(((C(R⁴)₂)ₙO)ₘ—, —((CH₂)ₙO)ₘ(CH₂)ₙ—, —(((C(R⁴)₂)ₙO)ₘC(R⁴)₂)ₙ—, —(CH₂)ₙC(═O)NH—, —(C(R⁴)₂)ₙC(═O)NR⁴—, —(CH₂)ₙNHC(═O)—, —(C(R⁴)₂)ₙNHC(═O)—, —NHC(═O)(CH₂)ₙ—, —NHC(═O)(C(R⁴)₂)ₙ—, —C(═O)NH(CH₂)ₙS—, —C(═O)NH(C(R⁴)₂)ₙS—, —S(CH₂)ₙC(═O)NH—, —S(C(R⁴)₂)ₙC(═O)NH—, —(CH₂)ₙS—, —(C(R⁴)₂)ₙS—, —S(CH₂)ₙ—, —S(C(R⁴)₂)ₙ—, —(CH₂)ₙNH—, —(C(R⁴)₂)ₙNH—, —C(═O)NH(CH₂)ₙNHC(═O)(CH₂)ₙ—, —C(═O)NH(C(R⁴)₂)ₙNHC(═O)(C(R⁴)₂)ₙ—, —C(═O)(CH₂)ₙ—, —C(═O)(C(R⁴)₂)ₙ—, —(CH₂)ₙC(═O)—, —(C(R⁴)₂)ₙC(═O)—, —(CH₂)ₙ(O(CH₂)ₙ)ₘNHC(═O)(CH₂)ₙ—, —(C(R⁴)₂)ₙ(O(C(R⁴)₂)ₙ)ₘNHC(═O)(C(R⁴)₂)ₙ—, —(CH₂)ₙ(O(CH₂)ₙ)ₘOC(═O)NH(CH₂)ₙ—, —(C(R⁴)₂)ₙ(O(C(R⁴)₂)ₙ)ₘOC(═O)NH(C(R⁴)₂)ₙ—, —(CH₂)ₙNHC(═O)(CH₂)ₙ—, —(C(R⁴)₂)ₙNHC(═O)(C(R⁴)₂)ₙ—, —(CH₂)ₙNH((CH₂)ₙO)ₘ(CH₂)ₙ—, —(C(R⁴)₂)ₙNH((C(R⁴)₂)ₙO)ₘ(C(R⁴)₂)ₙ—, —(O(CH₂)ₙ)ₘNHC(═O)(CH₂)ₙ—, —(O(C(R⁴)₂)ₙ)ₘNHC(═O)(C(R⁴)₂)ₙ—,

[chemical structure]

[0384] A₃ is —C(═O)NH—, —C(═O)NH(CH₂)ₙ—, —C(═O)NH(C(R⁴)₂)ₙ—, —(O(CH₂)ₙ)ₘ—, —(O(C(R⁴)₂)ₙ)ₘ—, —((CH₂)ₙO)ₘ—, —(((C(R⁴)₂)ₙO)ₘ—, —((CH₂)ₙO)ₘ(CH₂)ₙ—, —(((C(R⁴)₂)ₙO)ₘC(R⁴)₂)ₙ—, —(CH₂)ₙC(═O)NH—, —(C(R⁴)₂)ₙC(═O)NH—, —(CH₂)ₙNHC(═O)—, —(C(R⁴)₂)ₙNHC(═O)—, —NHC(═O)(CH₂)ₙ—, —NHC(═O)(C(R⁴)₂)ₙ—, —C(═O)NH(CH₂)ₙS—, —C(═O)NH(C(R⁴)₂)ₙS—, —S(CH₂)ₙC(═O)NH—, —S(C(R⁴)₂)ₙC(═O)NH—, —(CH₂)ₙS—, —(C(R⁴)₂)ₙS—, —S(CH₂)ₙ—, —S(C(R⁴)₂)ₙ—, —C(═O)NH(CH₂)ₙNHC(═O)(CH₂)ₙ—, —C(═O)NH(C(R⁴)₂)ₙNHC(═O)(C(R⁴)₂)ₙ—, —C(═O)(CH₂)ₙ—, —C(═O)(C(R⁴)₂)ₙ—, —(CH₂)ₙC(═O)—, —(C(R⁴)₂)ₙC(═O)—, —(CH₂)ₙ(O(CH₂)ₙ)ₘNHC(═O)(CH₂)ₙ—, —(C(R⁴)₂)ₙ(O(C(R⁴)₂)ₙ)ₘNHC(═O)(C(R⁴)₂)ₙ—, —(CH₂)ₙ(O(CH₂)ₙ)ₘOC(═O)NH(CH₂)ₙ—, —(C(R⁴)₂)ₙ(O(C(R⁴)₂)ₙ)ₘOC(═O)NH(C(R⁴)₂)ₙ—, —(CH₂)ₙ(O(CH₂)ₙ)ₘOC(═O)—, —(C(R⁴)₂)ₙ(O(C(R⁴)₂)ₙ)ₘOC(═O)—, —(CH₂)ₙ(O(CH₂)ₙ)ₘOC(═O)—, —(C(R⁴)₂)ₙ(O(C(R⁴)₂)ₙ)ₘOC(═O)—, —(CH₂)ₙNHC(═O)(CH₂)ₙ—, —(C(R⁴)₂)ₙNHC(═O)(C(R⁴)₂)ₙ—, —(O(CH₂)ₙ)ₘNHC(═O)(CH₂)ₙ—, —(O(C(R⁴)₂)ₙ)ₘNHC(═O)(C(R⁴)₂)ₙ—,

[chemical structure]

[0385] A₄ is —C(═O)NH—, —C(═O)NH(CH₂)ₙ—, —C(═O)NH(C(R⁴)₂)ₙ—, —(O(CH₂)ₙ)ₘ—, —(O(C(R⁴)₂)ₙ)ₘ—, —((CH₂)ₙO)ₘ—, —(((C(R⁴)₂)ₙO)ₘ—, —((CH₂)ₙO)ₘ(CH₂)ₙ—, —(((C(R⁴)₂)ₙO)ₘC(R⁴)₂)ₙ—, —(CH₂)ₙC(═O)NH—, —(C(R⁴)₂)ₙC(═O)NH—, —(CH₂)ₙNHC(═O)—, —(C(R⁴)₂)ₙNHC(═O)—, —NHC(═O)(CH₂)ₙ—, —NHC(═O)(C(R⁴)₂)ₙ—, —C(═O)NH(CH₂)ₙS—, —C(═O)NH(C(R⁴)₂)ₙS—, —S(CH₂)ₙC(═O)NH—, —S(C(R⁴)₂)ₙC(═O)NH—, —C(═O)NH(CH₂)ₙNHC(═O)(CH₂)ₙ—, —C(═O)NH(C(R⁴)₂)ₙNHC(═O)(C(R⁴)₂)ₙ—, —C(═O)(CH₂)ₙ—, —C(═O)(C(R⁴)₂)ₙ—, —(CH₂)ₙC(═O)—, —(C(R⁴)₂)ₙC(═O)—, —(CH₂)ₙ(O(CH₂)ₙ)ₘNHC(═O)(CH₂)ₙ—, —(C(R⁴)₂)ₙ(O(C(R⁴)₂)ₙ)ₘNHC(═O)(C(R⁴)₂)ₙ—, —(CH₂)ₙNHC(═O)(CH₂)ₙ—, —(C(R⁴)₂)ₙNHC(═O)(C(R⁴)₂)ₙ—, —(CH₂)ₙNH((CH₂)ₙO)ₘ(CH₂)ₙ—, —(C(R⁴)₂)ₙNH((C(R⁴)₂)ₙO)ₘ(C(R⁴)₂)ₙ—, —(O(CH₂)ₙ)ₘNHC(═O)(CH₂)ₙ—, or —(O(C(R⁴)₂)ₙ)ₘNHC(═O)(C(R⁴)₂)ₙ—;
[0386] each X² is independently selected from a bond,

[chemical structure]

[chemical structure]

[chemical structure]

—S—, —Si(OH)₂O—,

[chemical structure]

—CHR⁴(CH₂)ₙC(═O)NH—, —CHR⁴(CH₂)ₙNHC(═O)—, —C(═O)NH— and —NHC(═O)—;
[0387] each R⁴ is independently selected from H, C₁₋₄alkyl, —C(═O)OH and —OH,
[0388] each R⁵ is independently selected from H, C₁₋₄alkyl, phenyl or C₁₋₄alkyl substituted with 1 to 3 —OH groups;
[0389] each R⁶ is independently selected from H, fluoro, benzyloxy substituted with —C(═O)OH, benzyl substituted with —C(═O)OH, C₁₋₄alkoxy substituted with —C(═O)OH and C₁₋₄alkyl substituted with —C(═O)OH;
[0390] R⁷ is independently selected from H, phenyl and pyridine;
[0391] R⁸ is independently selected from

[chemical structure]

[0392] R⁹ is independently selected from H and C₁₋₆haloalkyl;
[0393] each n is independently selected from 1, 2, 3, 4, 5, 6, 7, 8 and 9,
[0394] each m is independently selected from 1, 2, 3, 4, 5, 6, 7, 8 and 9, and
[0395] TG is a drug moiety, an affinity probe, a chelator, a spectroscopic probe, a radioactive probe, an imaging reagent, a lipid molecule, a polyethylene glycol, a polymer, a nanoparticle, a quantum dot, a liposome, a PLGA particle, a polysaccharide, an acetyl group, or a surface.
   In certain embodiments of such conjugated antibodies or antibody fragments thereof, the conjugated serine is

[chemical structure]

of such conjugated antibodies or antibody fragments thereof, X₂ is

[chemical structure]

### or —(CH₂)C(═O)NH—.

[0396] The present invention also provides pharmaceutical compositions comprising an effective amount of the immunoconjugate of the invention, or a pharmaceutically acceptable salt thereof, and a pharmaceutically acceptable diluent, carrier or excipient.

[0397] The present invention provides a method of treating a disease, such as cancer, comprising administering to a mammal in need thereof an effective amount of an immunoconjugate of the invention. In some embodiments, the present invention provides immunoconjugates for use as a medicament. In some embodiments, the present invention provides use of an immunoconjugate in the manufacture of a medicament for treatment of cancer, autoimmune diseases, inflammatory diseases, infectious diseases (e.g., bacterial, fungus, virus), genetic disorders, cardiovascular diseases, and/or metabolic diseases.

[0398] The present invention provides methods of producing the immunoconjugates described herein. In one embodiment, the method comprises incubating a modified antibody or antibody fragment of the invention, a 4′-phosphopantetheinyl transferase, and a terminal group linked to CoA under suitable conditions to promote formation of an immunoconjugate comprising the antibody or antibody fragment and the terminal group linked together by 4′-phosphopantetheine. In a specific embodiment, the suitable condition comprises a temperature between 4° C. to 37° C. and pH 6.5 to pH 9.0.

[0399] In another embodiment of such methods of producing the immunoconjugates described herein, the method comprising incubating under suitable conditions a modified antibody or antibody fragment of the invention, a 4′-phosphopantetheinyl transferase, and a terminal group linked to CoA or a terminal group linked to a CoA analogue, thereby promoting formation of the immunoconjugate which comprises the antibody or antibody fragment and the terminal group linked together by a linker comprising a 4′-phosphopantetheine or a 4′-phosphopantetheine analogue. In a specific embodiment, the suitable condition comprises a temperature between 4° C. to 37° C. and pH 6.5 to pH 9.0.

[0400] In another embodiment of such methods of producing the immunoconjugates described herein, the method comprising comprises the steps:
[0401] i) incubating under suitable conditions a modified antibody or antibody fragment of the invention with a 4′-phosphopantetheinyl transferase and a CoA or CoA analogue, thereby attaching a 4′-phosphopantetheine or a 4′-phosphopantetheine analogue to the antibody or antibody fragment, wherein the 4′-phosphopantetheine and the 4′-phosphopantetheine analogue comprises a functional group, and
[0402] ii) reacting the 4′-phosphopantetheine or the 4′-phosphopantetheine analogue with a reactive group optionally linked to a terminal group, thereby forming the immunoconjugate comprising the antibody or antibody fragment and the terminal group linked together by a linker comprising a 4′-phosphopantetheine or a 4′-phosphopantetheine analogue.
   In a specific embodiment, the suitable condition comprises a temperature between 4° C. to 37° C. and pH 6.5 to pH 9.0.

[0403] In another embodiment of such methods of producing the immunoconjugates described herein, the method comprising comprises the steps:
[0404] i) incubating under suitable conditions a modified antibody or antibody fragment of the invention with a 4′-phosphopantetheinyl transferase and a CoA or CoA analogue, thereby attaching a 4′-phosphopantetheine or a 4′-phosphopantetheine analogue to the antibody or antibody fragment, wherein the 4′-phosphopantetheine and the 4′-phosphopantetheine analogue comprises a protected functional group;
[0405] ii) deprotecting the protected functional group of the 4′-phosphopantetheine or the 4′-phosphopantetheine analogue, and
[0406] iii) reacting the deprotected functional group of the 4′-phosphopantetheine or the 4′-phosphopantetheine analogue with a reactive group optionally linked to a terminal group, thereby forming the immunoconjugate comprising the antibody or antibody fragment and the terminal group linked together by a linker comprising a 4′-phosphopantetheine or a 4′-phosphopantetheine analogue.
   In a specific embodiment, the suitable condition comprises a temperature between 4° C. to 37° C. and pH 6.5 to pH 9.0.

### DEFINITIONS

[0407] The terms “alkenyl” or “alkene”, as used herein, refer to a branched or straight chain hydrocarbon having at least one carbon-carbon double bond. Atoms oriented about the double bond are in either the cis (Z) or trans (E) conformation. As used herein, the terms “C₂-C₄alkenyl”, “C₂-C₅alkenyl”, “C₂-C₆alkenyl”, “C₂-C₇alkenyl”, “C₂-C₈alkenyl”, “C₂-C₄alkene”, “C₂-C₅alkene”, “C₂-C₆alkene”, “C₂-C₇alkene”, and “C₂-C₈alkene” refer to a branched or straight chain hydrocarbon having at least one carbon-carbon double bond and containing at least 2, and at most 4, 5, 6, 7 or 8 carbon atoms, respectively. Non-limiting examples of alkenyl groups, as used herein, include ethenyl, ethane, epropenyl, propene, allyl (2-propenyl), 2-propene, butenyl, pentenyl, pentene, hexenyl, heptenyl, heptene, octenyl, nonenyl, nonene, decenyl, decene and the like. If not otherwise specified, an alkenyl group generally is a C₂-C₆ alkenyl.

[0408] The terms “alkynyl” or “alkyne”, as used herein, refer to a branched or straight chain hydrocarbon radical having at least one carbon-carbon triple bond. As used herein, the terms “C₂-C₄alkynyl”, “C₂-C₅alkynyl”, “C₂-C₆alkynyl”, “C₂-C₇alkynyl”, and “C₂-C₈alkynyl” refer to a branched or straight chain hydrocarbon radical having at least one carbon-carbon triple bond and containing at least 2, and at most 4, 5, 6, 7 or 8 carbon atoms, respectively. Non-limiting examples of alkynyl groups, as used herein, include ethynyl, propynyl, butynyl, pentynyl, hexynyl, heptynyl, octynyl, nonynyl, decynyl and the like. If not otherwise specified, an alkynyl group generally is a C₂-C₆ alkynyl.

[0409] The term “alkyl,” as used herein, refers to a saturated branched or straight chain hydrocarbon. As used herein, the terms “C₁-C₃alkyl”, “C₁-C₄alkyl”, “C₁-C₅alkyl”, “C₁-C₆alkyl”, “C₁-C₇alkyl” or “C₁-C₈alkyl” refer to saturated branched or straight chain hydrocarbon containing at least 1, and at most 3, 4, 5, 6, 7 or 8 carbon atoms, respectively. Non-limiting examples of alkyl groups as used herein include methyl, ethyl, n-propyl, isopropyl, n-butyl, isobutyl, sec-butyl, t-butyl, n-pentyl, isopentyl, hexyl, heptyl, octyl, nonyl, decyl and the like. If not otherwise specified, an alkyl group generally is a C₁-C₆ alkyl.

[0410] The term “alkoxy,” as used herein, refers to the group —ORₐ, where Rₐ is an alkyl group as defined herein. As used herein, the terms “C₁-C₃alkoxy”, “C₁-C₄alkoxy”, “C₁-C₅alkoxy”, “C₁-C₆alkoxy”, “C₁-C₇alkoxy” and “C₁-C₈alkoxy” refer to an alkoxy group wherein the alkyl moiety contains at least 1, and at most 3, 4, 5, 6, 7 or 8, carbon atoms. Non-limiting examples of alkoxy groups, as used herein, include methoxy, ethoxy, n-propoxy, isopropoxy, n-butyloxy, t-butyloxy, pentyloxy, hexyloxy, heptyloxy, octyloxy, nonyloxy, decyloxy and the like.

[0411] The term “aryl”, as used herein, refers to monocyclic, bicyclic, and tricyclic ring systems having a total of six to fourteen ring members, wherein at least one ring in the system is aromatic. An aryl group also includes one or more aromatic rings fused to one or more non-aromatic hydrocarbon rings. Non-limiting examples of aryl groups, as used herein, include phenyl (Ph), naphthyl, fluorenyl, indenyl, azulenyl, anthracenyl and the like. An aryl group may contain one or more substituents and thus may be “optionally substituted”. Unless otherwise specified, aryl groups can have up to four substituents.

[0412] The term “cycloalkyl”, as used herein, refers to a saturated monocyclic, fused bicyclic, fused tricyclic or bridged polycyclic ring assembly. As used herein, the terms “C₃-C₅cycloalkyl”, “C₃-C₆cycloalkyl”, “C₃-C₇cycloalkyl”, “C₃-C₈cycloalkyl, “C₃-C₉cycloalkyl and “C₃-C₁₀cycloalkyl refer to a saturated monocyclic, fused bicyclic, fused tricyclic or bridged polycyclic ring assembly which contains at least 3, and at most 5, 6, 7, 8, 9 or 10, carbon atoms. Non-limiting examples of cycloalkyl groups, as used herein, include cyclopropyl, cyclobutyl, cyclopentyl, cyclohexyl, cycloheptyl, cyclooctyl, cyclononyl, cyclodecyl, decahydronaphthalenyl and the like. If not otherwise specified, a cycloalkyl group generally is a C₃-C₈ cycloalkyl.

[0413] The terms “cycloalkenyl” or “cycloalkene”, as used herein, refers to a monocyclic, fused bicyclic, fused tricyclic or bridged polycyclic ring assembly having at least one carbon-carbon double bond. Atoms oriented about the double bond are in either the cis (Z) or trans (E) conformation. A monocyclic cycloalkene can be fused to one or two aryl rings. Non-limiting examples of cycloalkenyl groups, as used herein, include cyclopropenyl, cyclobutenyl, cyclopentenyl, cyclohexenyl, cycloheptenyl, cyclooctenyl, cyclononenyl, cyclodecenyl, and the like. If not otherwise specified, a cycloalkenyl group generally is a C₅-C₈ cycloalkenyl.

[0414] The terms “cycloalkynyl” or “cycloalkyne”, as used herein, refers to a monocyclic, fused bicyclic, fused tricyclic or bridged polycyclic ring assembly having at least one carbon-carbon triple bond. A monocyclic cycloalkyne can be fused to one or two aryl rings. Non-limiting examples of cycloalkynyl groups, as used herein, include cyclopropynyl, cyclobutynyl, cyclopentynyl, cyclohexynyl, cycloheptynyl, cyclooctynyl, cyclononynyl, cyclodecynyl, and the like. If not otherwise specified, a cycloalkynyl group generally is a C₆-C₈ cycloalkynyl.

[0415] The term “heteroaryl,” as used herein, refers to a 5-6 membered heteroaromatic monocyclic ring having 1 to 4 heteroatoms independently selected from nitrogen, oxygen and sulfur, an 8-10 membered fused bicyclic ring having 1 to 4 heteroatoms independently selected from nitrogen, oxygen and sulfur as ring members and where at least one of the rings is aromatic, or a 12-14 membered fused tricyclic ring having 1 to 4 heteroatoms independently selected from nitrogen, oxygen and sulfur and where at least one of the rings is aromatic. Such fused bicyclic and tricyclic ring systems may be fused to one or more aryl, cycloalkyl, or heterocycloalkyl rings. Non-limiting examples of heteroaryl groups, as used herein, include 2- or 3-furyl; 1-, 2-, 4-, or 5-imidazolyl; 3-, 4-, or 5-isothiazolyl; 3-, 4-, or 5-isoxazolyl; 2-, 4-, or 5-oxazolyl; 4- or 5-1,2,3-oxadiazolyl; 2- or 3-pyrazinyl; 1-, 3-, 4-, or 5-pyrazolyl; 3-, 4-, 5- or 6-pyridazinyl; 2-, 3-, or 4-pyridyl; 2-, 4-, 5- or 6-pyrimidinyl; 1-, 2- or 3-pyrrolyl; 1- or 5-tetrazolyl; 2- or 5-1,3,4-thiadiazolyl; 2-, 4-, or 5-thiazolyl; 2- or 3-thienyl; 2-, 4- or 6-1,3,5-triazinyl; 1-, 3- or 5-1,2,4-triazolyl; 1-, 4- or 5-1,2,3-triazolyl; 1-, 2-, 3-, 4-, 5-, 6-, 7-, 8-, or 9-acridinyl; 1-, 3-, 4-, 5-, 6-, 7-, 8-, 9-, or 10-benzo[g]isoquinoline; 2-, 4-, 5-, 6-, or 7-benzoxazolyl; 1-, 2-, 4-, 5-, 6-, or 7-benzimidazolyl; 2-, 4-, 5-, 6-, or 7-benzothiazolyl; 2-, 3-, 4-, 5-, 6-, 7-benzo[b]thienyl; 2-, 3-, 4-, 5-, 6-, 7-, 8-, 9-benzo[b]oxepine; 2-, 4-, 5-, 6-, 7-, or 8-benzoxazinyl; 1-, 2-, 3-, 4-, 5-, 6-, 7-, 8, or 9-carbazolyl; 3-, 4-, 5-, 6-, 7-, or 8-cinnolinyl; 2-, 4-, or 5-4H-imidazo[4,5-d]thiazolyl; 2-, 3-, 5-, or 6-imidazo[2,1-b]thiazolyl; 2-, 3-, 6-, or 7-imidazo[1,2-b][1,2,4]triazinyl; 1-, 3-, 4-, 5-, 6-, or 7-indazolyl; 1-, 2-, 3-, 5-, 6-, 7-, or 8-indolizinyl; 1-, 2-, 3-, 4-, 5-, 6-, or 7-indolyl; 1-, 2-, 3-, 4-, 5-, 6-, or 7-isoindolyl; 1-, 3-, 4-, 5-, 6-, 7-, or 8-isoquinoliyl; 2-, 3-, 4-, 5-, 6-, or 7-naphthyridinyl; 1-, 2-, 4-, 5-, 6-, 7-, 8-, or 9-perimidinyl; 1-, 2-, 3-, 4-, 6-, 7-, 8-, 9-, or 10-phenanthridinyl; 1-, 2-, 3-, 4-, 5-, 6-, 7-, 8-, 9-, or 10-phenathrolinyl; 1-, 2-, 3-, 4-, 6-, 7-, 8-, or 9-phenazinyl; 1-, 2-, 3-, 4-, 6-, 7-, 8-, 9-, or 10-phenothiazinyl; 1-, 2-, 3-, 4-, 6-, 7-, 8-, 9-, or 10-phenoxazinyl; 1-, 4-, 5-, 6-, 7-, or 8-phthalazinyl; 2-, 4-, 6-, or 7-pteridinyl; 2-, 6-, 7-, or 8-purinyl; 2-, 3-, 5-, 6-, 7-, 8-, 9-, 10-, or 11-7H-pyrazino[2,3-c]carbazolyl; 2-, 3-, 5-, 6-, or 7-furo[3,2-b]-pyranyl; 1-, 3-, or 5-1H-pyrazolo[4,3-d]-oxazolyl; 2-, 3-, 5-, or 8-pyrazino[2,3-d]pyridazinyl; 1-, 2-, 3-, 4-, 5-, or 8-5H-pyrido[2,3-d]-o-oxazinyl; 1-, 2-, 3-, 4-, 6-, 7-, 8-, or 9-quinolizinyl; 2-, 3-, 4-, 5-, 6-, 7-, or 8-quinolinyl; 2-, 3-, 4-, 5-, 6-, 7-, or 8-quinazolinyl; 2-, 3-, 4-, or 5-thieno[2,3-b]furanyl, and 1-, 3-, 6-, 7-, 8-, or 9-furo[3,4-c]cinnolinyl.

[0416] The term “heteroatoms,” as used herein, refers to nitrogen (N), oxygen (O) or sulfur (S) atoms.

[0417] The term “heterocycloalkyl,” as used herein refers to a to saturated 3-8 membered monocyclic hydrocarbon ring structure, a saturated 6-9 membered fused bicyclic hydrocarbon ring structure, or a saturated 10-14 membered fused tricyclic hydrocarbon ring structure, wherein one to four of the ring carbons of the hydrocarbon ring structure are replaced by one to four groups independently selected from —O—, —NR—, and —S—, wherein R is hydrogen, C₁-C₄alkyl or an amino protecting group. Non-limiting examples of heterocycloalkyl groups, as used herein, include aziridinyl, aziridin-1-yl, aziridin-2-yl, aziridin-3-yl, oxiranyl, oxiran-2-yl, oxiran-3-yl, thiiranyl, thiiran-2-yl, thiiran-3-yl, azetadinyl, azetadin-1-yl, azetadin-2-yl, azetadin-3-yl, oxetanyl, oxetan-2-yl, oxetan-3-yl, oxetan-4-yl, thietanyl, thietan-2-yl, thietan-3-yl, thietan-4-yl, pyrrolidinyl, pyrrolidin-1-yl, pyrrolidin-2-yl, pyrrolidin-3-yl, pyrrolidin-4-yl, pyrrolidin-5-yl, tetrahydrofuranyl, tetrahydrofuran-2-yl, tetrahydrofuran-3-yl, tetrahydrofuran-4-yl, tetrahydrofuran-5-yl, tetrahydrothienyl, tetrahydrothien-2-yl, tetrahydrothien-3-yl, tetrahydrothien-4-yl, tetrahydrothien-5-yl, piperidinyl, piperidin-1-yl, piperidin-2-yl, piperidin-3-yl, piperidin-4-yl, piperidin-5-yl, piperidin-6-yl, tetrahydropyranyl, tetrahydropyran-2-yl, tetrahydropyran-3-yl, tetrahydropyran-4-yl, tetrahydropyran-5-yl, tetrahydropyran-6-yl, tetrahydrothiopyranyl, tetrahydrothiopyran-2-yl, tetrahydrothiopyran-3-yl, tetrahydrothiopyran-4-yl, tetrahydrothiopyran-5-yl, tetrahydrothiopyran-6-yl, piperazinyl, piperazin-1-yl, piperazin-2-yl, piperazin-3-yl, piperazin-4-yl, piperazin-5-yl, piperazin-6-yl, morpholinyl, morpholin-2-yl, morpholin-3-yl, morpholin-4-yl, morpholin-5-yl, morpholin-6-yl, thiomorpholinyl, thiomorpholin-2-yl, thiomorpholin-3-yl, thiomorpholin-4-yl, thiomorpholin-5-yl, thiomorpholin-6-yl, oxathianyl, oxathian-2-yl, oxathian-3-yl, oxathian-5-yl, oxathian-6-yl, dithianyl, dithian-2-yl, dithian-3-yl, dithian-5-yl, dithian-6-yl, azepanyl, azepan-1-yl, azepan-2-yl, azepan-3-yl, azepan-4-yl, azepan-5-yl, azepan-6-yl, azepan-7-yl, oxepanyl, oxepan-2-yl, oxepan-3-yl, oxepan-4-yl, oxepan-5-yl, oxepan-6-yl, oxepan-7-yl, thiepanyl, thiepan-2-yl, thiepan-3-yl, thiepan-4-yl, thiepan-5-yl, thiepan-6-yl, thiepan-7-yl, dioxolanyl, dioxolan-2-yl, dioxolan-4-yl, dioxolan-5-yl, thioxanyl, thioxan-2-yl, thioxan-3-yl, thioxan-4-yl, thioxan-5-yl, dithiolanyl, dithiolan-2-yl, dithiolan-4-yl, dithiolan-5-yl, pyrrolinyl, pyrrolin-1-yl, pyrrolin-2-yl, pyrrolin-3-yl, pyrrolin-4-yl, pyrrolin-5-yl, imidazolinyl, imidazolin-1-yl, imidazolin-3-yl, imidazolin-4-yl, imidazolin-5-yl, imidazolidinyl, imidazolidin-1-yl, imidazolidin-2-yl, imidazolidin-3-yl, imidazolidin-4-yl, imidazolidin-4-yl, pyrazolinyl, pyrazolin-1-yl, pyrazolin-3-yl, pyrazolin-4-yl, pyrazolin-5-yl, pyrazolidinyl, pyrazolidin-1-yl, pyrazolidin-2-yl, pyrazolidin-3-yl, pyrazolidin-4-yl, pyrazolidin-5-yl, hexahydro-1,4-diazepinyl, dihydrofuranyldihydropyranyl, 1,2,3,6-tetrahydropyridinyl, 2H-pyranyl, 4H-pyranyl, dihydropyranyl, dihydrothienyl, dihydrofuranyl, 3-azabicyclo[3.1.0]hexanyl, 3-azabicyclo[4.1.0]heptanyl, pyrrolidinyl-2-one, piperidinyl-3-one piperidinyl-2-one, piperidinyl-4-one, and 2H-pyrrolyl.

[0418] The term “optionally substituted”, as used herein, means that the referenced group may or may not be substituted with one or more additional group(s) in place of one or more hydrogen atoms of the unsubstituted group. The number of such groups that can be present ranges from one up to the number of hydrogen atoms on the unsubstituted group. The optional substituents, unless otherwise specified, are individually and independently selected from alkyl, alkenyl, alkynyl, cycloalkyl, aryl, heteroaryl, heterocycloalkyl, hydroxyl, alkoxy, mercaptyl, cyano, halo, carbonyl, thiocarbonyl, isocyanato, thiocyanato, isothiocyanato, nitro, perhaloalkyl, perfluoroalkyl, and amino, including mono- and di-substituted amino groups, and the protected derivatives thereof. Non-limiting examples of optional substituents include, halo (particularly F, Cl and Br), —CN, —OR, —R, —NO₂, —C(═O)R, —OC(═O)R, —C(═O)OR, —OC(═O)NHR, —C(═O)N(R)₂, —SR—, —S(═O)R, —S(═O)₂R, —NHR, —N(R)₂, —NHC(═O)R, —NRC(═O)R, —NRC(S)R, NHC(═O)OR, —NRCO₂R, —NRC(═O)N(R)₂, —NRC(S)N(R)₂, —NRNRC(═O)R, —NRNRC(═O)N(R)₂, —NRNRCO₂R, —C(═O)NH—, S(═O)₂NHR, —S(═O)₂N(R)₂, —NHS(═O)₂, —NHS(═O)₂R, —C(═O)C(═O)R, —C(═O)CH₂C(═O)R, —C(S)R, —C(═O)N(R)₂, —C(S)N(R)₂, —OC(═O)N(R)₂, —C(O)N(OR)R, —C(NOR)R, —S(═O)₃R, —NRSO₂N(R)₂, —NRSO₂R, —N(OR)R, —C(═NH)—N(R)₂, —P(═O)₂R, —PO(R)₂, —OPO(R)₂, —(CH₂)₀₋₂NHC(═O)R, phenyl (Ph) optionally substituted with R, —O(Ph) optionally substituted with R, —(CH₂)₁₋₂(Ph), optionally substituted with R, CH═CH(Ph), optionally substituted with R, C₁-C₆ alkyl, C₁-C₆ alkoxy, aryl, heteroaryl, cycloalkyl, heterocycloalkyl, halo-substituted C₁-C₆alkyl, halo-substituted C₁-C₆alkoxy, where each R is independently selected from H, C₁-C₆ alkyl, C₂-C₆ alkenyl, C₂-C₆ alkynyl, C₁-C₆ alkoxy, aryl, heteroaryl, C₃₋₈ cycloalkyl, C₃₋₈ heterocycloalkyl, halo-substituted C₁-C₆alkyl, halo-substituted C₁-C₆alkoxy; and two R groups on the same or on adjacent connected atoms can be taken together to form a 5-6 membered ring optionally containing an additional N, O or S as a ring member. Suitable substituents for alkyl, cycloalkyl, and heterocycloalkyl groups can further include ═CHR, ═O (oxo) and ═N—R. Preferred substituents for an aryl or heteroaryl group are selected from F, Cl, Br, CN, —NR′₂, hydroxy, C₁-C₄ alkyl, C₁-C₄ haloalkyl, C₁-C₄ alkoxy, C₁-C₄ haloalkoxy, C₁-C₄ alkoxy-C₁-C₄alkyl, —COOR′, —CONR′₂, —SR′, and —SO₂R′, where each R′ is H or C₁-C₄ alkyl. Preferred substituents for an alkyl, cycloalkyl or heterocycloalkyl group are selected from oxo (═O), F, Cl, Br, CN, —NR′₂, hydroxy, C₁-C₄ alkyl, C₁-C₄ haloalkyl, C₁-C₄ alkoxy, C₁-C₄ haloalkoxy, C₁-C₄ alkoxy-C₁-C₄alkyl, —COOR′, —CONR′₂, —SR′, and —SO₂R′, where each R′ is H or C₁-C₄ alkyl.

[0419] The term “amino acid” refers to naturally occurring, synthetic, and unnatural amino acids, as well as amino acid analogs and amino acid mimetics that function in a manner similar to the naturally occurring amino acids. Naturally occurring amino acids are those encoded by the genetic code, as well as those amino acids that are later modified, e.g., hydroxyproline, γ-carboxyglutamate, and O-phosphoserine. Amino acid analogs refer to compounds that have the same basic chemical structure as a naturally occurring amino acid, i.e., an α-carbon that is bound to a hydrogen, a carboxyl group, an amino group, and an R group, e.g., homoserine, norleucine, methionine sulfoxide, methionine methyl sulfonium. Such analogs have modified R groups (e.g., norleucine) or modified peptide backbones, but retain the same basic chemical structure as a naturally occurring amino acid. Amino acid mimetics refers to chemical compounds that have a structure that is different from the general chemical structure of an amino acid, but that functions in a manner similar to a naturally occurring amino acid.

[0420] The term “unnatural amino acid”, as used herein, is intended to represent amino acid structures that cannot be generated biosynthetically in any organism using unmodified or modified genes from any organism, whether the same or different. In addition, it is understood that such “unnatural amino acids” require a modified tRNA and a modified tRNA synthetase (RS) for incorporation into a protein. These “selected” orthogonal tRNA/RS pair are specific for the unnatural amino acid and are generated by a selection process as developed by Schultz et al. (see, e.g., Liu et al., Annu. Rev. Biochem. 79:413-444, 2010) or a similar procedure. The term “unnatural amino acid” does not include the natural occurring 22^{nd} proteinogenic amino acid pyrrolysine (Pyl) as well as its demethylated analogue pyrroline-carboxy-lysine (Pcl), because incorporation of both residues into proteins is mediated by the unmodified, naturally occurring pyrrolysyl-tRNA/tRNA synthetase pair (see, e.g., Ou et al., Proc. Natl. Acad. Sci. USA. 108:10437-10442, 2011).

[0421] The term “antibody” as used herein refers to a polypeptide of the immunoglobulin family that is capable of binding a corresponding antigen non-covalently, reversibly, and in a specific manner. For example, a naturally occurring IgG antibody is a tetramer comprising at least two heavy (H) chains and two light (L) chains inter-connected by disulfide bonds. Each heavy chain is comprised of a heavy chain variable region (abbreviated herein as V_{H}) and a heavy chain constant region. The heavy chain constant region is comprised of three domains, CH1, CH2 and CH3. Each light chain is comprised of a light chain variable region (abbreviated herein as V_{L}) and a light chain constant region. The light chain constant region is comprised of one domain, C_{L}. The V_{H} and V_{L} regions can be further subdivided into regions of hypervariability, termed complementarity determining regions (CDR), interspersed with regions that are more conserved, termed framework regions (FR). Each V_{H} and V_{L} is composed of three CDRs and four FRs arranged from amino-terminus to carboxy-terminus in the following order: FR1, CDR1, FR2, CDR2, FR3, CDR3, and FR4. The variable regions of the heavy and light chains contain a binding domain that interacts with an antigen. The constant regions of the antibodies may mediate the binding of the immunoglobulin to host tissues or factors, including various cells of the immune system (e.g., effector cells) and the first component (Clq) of the classical complement system.

[0422] The term “antibody” includes, but is not limited to, monoclonal antibodies, human antibodies, humanized antibodies, camelid antibodies, chimeric antibodies, and anti-idiotypic (anti-Id) antibodies (including, e.g., anti-Id antibodies to antibodies of the invention). The antibodies can be of any isotype/class (e.g., IgG, IgE, IgM, IgD, IgA and IgY), or subclass (e.g., IgG1, IgG2, IgG3, IgG4, IgA1 and IgA2).

[0423] Both the light and heavy chains are divided into regions of structural and functional homology. The terms “constant” and “variable” are used functionally. In this regard, it will be appreciated that the variable domains of both the light (V_{L}) and heavy (V_{H}) chain portions determine antigen recognition and specificity. Conversely, the constant domains of the light chain (C_{L}) and the heavy chain (CH1, CH2 or CH3) confer important biological properties such as secretion, transplacental mobility, Fc receptor binding, complement binding, and the like. By convention, the numbering of the constant region domains increases as they become more distal from the antigen binding site or amino-terminus of the antibody. The N-terminus is a variable region and at the C-terminus is a constant region; the CH3 and C_{L} domains actually comprise the carboxy-terminal domains of the heavy and light chain, respectively.

[0424] The term “antibody fragment” as used herein refers to either an antigen binding fragment of an antibody or a non-antigen binding fragment (e.g., Fc) of an antibody. The term “antigen binding fragment”, as used herein, refers to one or more portions of an antibody that retain the ability to specifically interact with (e.g., by binding, steric hindrance, stabilizing/destabilizing, spatial distribution) an epitope of an antigen. Examples of binding fragments include, but are not limited to, single-chain Fvs (scFv), disulfide-linked Fvs (sdFv), Fab fragments, F(ab′) fragments, a monovalent fragment consisting of the V_{L}, V_{H}, C_{L} and CH1 domains; a F(ab)₂ fragment, a bivalent fragment comprising two Fab fragments linked by a disulfide bridge at the hinge region; a Fd fragment consisting of the V_{H} and CH1 domains; a Fv fragment consisting of the V_{L} and V_{H} domains of a single arm of an antibody; a dAb fragment (Ward et al., Nature 341:544-546, 1989), which consists of a V_{H} domain; and an isolated complementarity determining region (CDR), or other epitope-binding fragments of an antibody.

[0425] Furthermore, although the two domains of the Fv fragment, V_{L} and V_{H}, are coded for by separate genes, they can be joined, using recombinant methods, by a synthetic linker that enables them to be made as a single protein chain in which the V_{L} and V_{H} regions pair to form monovalent molecules (known as single chain Fv (“scFv”); see, e.g., Bird et al., Science 242:423-426, 1988; and Huston et al., Proc. Natl. Acad. Sci. 85:5879-5883, 1988). Such single chain antibodies are also intended to be encompassed within the term “antigen binding fragment.” These antigen binding fragments are obtained using conventional techniques known to those of skill in the art, and the fragments are screened for utility in the same manner as are intact antibodies.

[0426] Antigen binding fragments can also be incorporated into single domain antibodies, maxibodies, minibodies, nanobodies, intrabodies, diabodies, triabodies, tetrabodies, v-NAR and bis-scFv (see, e.g., Hollinger and Hudson, Nature Biotechnology 23:1126-1136, 2005). Antigen binding fragments can be grafted into scaffolds based on polypeptides such as fibronectin type III (Fn3) (see U.S. Pat. No. 6,703,199, which describes fibronectin polypeptide monobodies).

[0427] Antigen binding fragments can be incorporated into single chain molecules comprising a pair of tandem Fv segments (V_{H}-CH1-V_{H}-CH1) which, together with complementary light chain polypeptides, form a pair of antigen binding regions (Zapata et al., Protein Eng. 8:1057-1062, 1995; and U.S. Pat. No. 5,641,870).

[0428] The term “monoclonal antibody” or “monoclonal antibody composition” as used herein refers to polypeptides, including antibodies and antibody fragments that have substantially identical amino acid sequence or are derived from the same genetic source. This term also includes preparations of antibody molecules of single molecular composition. A monoclonal antibody composition displays a single binding specificity and affinity for a particular epitope.

[0429] The term “human antibody”, as used herein, includes antibodies having variable regions in which both the framework and CDR regions are derived from sequences of human origin. Furthermore, if the antibody contains a constant region, the constant region also is derived from such human sequences, e.g., human germline sequences, or mutated versions of human germline sequences or antibody containing consensus framework sequences derived from human framework sequences analysis, for example, as described in Knappik et al., J. Mol. Biol. 296:57-86, 2000).

[0430] The human antibodies of the invention may include amino acid residues not encoded by human sequences (e.g., mutations introduced by random or site-specific mutagenesis in vitro or by somatic mutation in vivo, or a conservative substitution to promote stability or manufacturing).

[0431] The term “humanized” antibody, as used herein, refers to an antibody that retains the reactivity of a non-human antibody while being less immunogenic in humans. This can be achieved, for instance, by retaining the non-human CDR regions and replacing the remaining parts of the antibody with their human counterparts. See, e.g., Morrison et al., Proc. Natl. Acad. Sci. USA, 81:6851-6855 (1984); Morrison and Oi, Adv. Immunol., 44:65-92 (1988); Verhoeyen et al., Science, 239:1534-1536 (1988); Padlan, Molec. Immun., 28:489-498 (1991); Padlan, Molec. Immun., 31(3):169-217 (1994).

[0432] The term “recognize” as used herein refers to an antibody or antigen binding fragment thereof that finds and interacts (e.g., binds) with its epitope, whether that epitope is linear or conformational. The term “epitope” refers to a site on an antigen to which an antibody or antigen binding fragment of the invention specifically binds. Epitopes can be formed both from contiguous amino acids or noncontiguous amino acids juxtaposed by tertiary folding of a protein. Epitopes formed from contiguous amino acids are typically retained on exposure to denaturing solvents, whereas epitopes formed by tertiary folding are typically lost on treatment with denaturing solvents. An epitope typically includes at least 3, 4, 5, 6, 7, 8, 9, 10, 11, 12, 13, 14 or 15 amino acids in a unique spatial conformation. Methods of determining spatial conformation of epitopes include techniques in the art, for example, x-ray crystallography and 2-dimensional nuclear magnetic resonance (see, e.g., Epitope Mapping Protocols in Methods in Molecular Biology, Vol. 66, G. E. Morris, Ed. (1996)).

[0433] The term “affinity” as used herein refers to the strength of interaction between antibody and antigen at single antigenic sites. Within each antigenic site, the variable region of the antibody “arm” interacts through weak non-covalent forces with antigen at numerous sites; the more interactions, the stronger the affinity.

[0434] The term “isolated antibody” refers to an antibody that is substantially free of other antibodies having different antigenic specificities. An isolated antibody that specifically binds to one antigen may, however, have cross-reactivity to other antigens. Moreover, an isolated antibody may be substantially free of other cellular material and/or chemicals.

[0435] The term “conservatively modified variant” applies to both amino acid and nucleic acid sequences. With respect to particular nucleic acid sequences, conservatively modified variants refers to those nucleic acids which encode identical or essentially identical amino acid sequences, or where the nucleic acid does not encode an amino acid sequence, to essentially identical sequences. Because of the degeneracy of the genetic code, a large number of functionally identical nucleic acids encode any given protein. For instance, the codons GCA, GCC, GCG and GCU all encode the amino acid alanine. Thus, at every position where an alanine is specified by a codon, the codon can be altered to any of the corresponding codons described without altering the encoded polypeptide. Such nucleic acid variations are “silent variations,” which are one species of conservatively modified variations. Every nucleic acid sequence herein which encodes a polypeptide also describes every possible silent variation of the nucleic acid. One of skill will recognize that each codon in a nucleic acid (except AUG, which is ordinarily the only codon for methionine, and TGG, which is ordinarily the only codon for tryptophan) can be modified to yield a functionally identical molecule. Accordingly, each silent variation of a nucleic acid that encodes a polypeptide is implicit in each described sequence.

[0436] For polypeptide sequences, “conservatively modified variants” include individual substitutions, deletions or additions to a polypeptide sequence which result in the substitution of an amino acid with a chemically similar amino acid. Conservative substitution tables providing functionally similar amino acids are well known in the art. Such conservatively modified variants are in addition to and do not exclude polymorphic variants, interspecies homologs, and alleles of the invention. The following eight groups contain amino acids that are conservative substitutions for one another: 1) Alanine (A), Glycine (G); 2) Aspartic acid (D), Glutamic acid (E); 3) Asparagine (N), Glutamine (Q); 4) Arginine (R), Lysine (K); 5) Isoleucine (I), Leucine (L), Methionine (M), Valine (V); 6) Phenylalanine (F), Tyrosine (Y), Tryptophan (W); 7) Serine (S), Threonine (T); and 8) Cysteine (C), Methionine (M) (see, e.g., Creighton, Proteins (1984)). In some embodiments, the term “conservative sequence modifications” are used to refer to amino acid modifications that do not significantly affect or alter the binding characteristics of the antibody containing the amino acid sequence.

[0437] The term “optimized” as used herein refers to a nucleotide sequence has been altered to encode an amino acid sequence using codons that are preferred in the production cell or organism, generally a eukaryotic cell, for example, a yeast cell, a Pichia cell, a fungal cell, a Trichoderma cell, a Chinese Hamster Ovary cell (CHO) or a human cell. The optimized nucleotide sequence is engineered to retain completely or as much as possible the amino acid sequence originally encoded by the starting nucleotide sequence, which is also known as the “parental” sequence.

[0438] The terms “percent identical” or “percent identity,” in the context of two or more nucleic acids or polypeptide sequences, refers to two or more sequences or subsequences that are the same. Two sequences are “substantially identical” if two sequences have a specified percentage of amino acid residues or nucleotides that are the same (i.e., 60% identity, optionally 65%, 70%, 75%, 80%, 85%, 90%, 95%, or 99% identity over a specified region, or, when not specified, over the entire sequence), when compared and aligned for maximum correspondence over a comparison window, or designated region as measured using one of the following sequence comparison algorithms or by manual alignment and visual inspection. Optionally, the identity exists over a region that is at least about 50 nucleotides (or 10 amino acids) in length, or more preferably over a region that is 100 to 500 or 1000 or more nucleotides (or 20, 50, 200 or more amino acids) in length.

[0439] For sequence comparison, typically one sequence acts as a reference sequence, to which test sequences are compared. When using a sequence comparison algorithm, test and reference sequences are entered into a computer, subsequence coordinates are designated, if necessary, and sequence algorithm program parameters are designated. Default program parameters can be used, or alternative parameters can be designated. The sequence comparison algorithm then calculates the percent sequence identities for the test sequences relative to the reference sequence, based on the program parameters.

[0440] A “comparison window”, as used herein, includes reference to a segment of any one of the number of contiguous positions selected from the group consisting of from 20 to 600, usually about 50 to about 200, more usually about 100 to about 150 in which a sequence may be compared to a reference sequence of the same number of contiguous positions after the two sequences are optimally aligned. Methods of alignment of sequences for comparison are well known in the art. Optimal alignment of sequences for comparison can be conducted, e.g., by the local homology algorithm of Smith and Waterman, Adv. Appl. Math. 2:482c (1970), by the homology alignment algorithm of Needleman and Wunsch, J. Mol. Biol. 48:443 (1970), by the search for similarity method of Pearson and Lipman, Proc. Natl. Acad. Sci. USA 85:2444 (1988), by computerized implementations of these algorithms (GAP, BESTFIT, FASTA, and TFASTA in the Wisconsin Genetics Software Package, Genetics Computer Group, 575 Science Dr., Madison, Wis.), or by manual alignment and visual inspection (see, e.g., Brent et al., Current Protocols in Molecular Biology, 2003).

[0441] Two examples of algorithms that are suitable for determining percent sequence identity and sequence similarity are the BLAST and BLAST 2.0 algorithms, which are described in Altschul et al., Nuc. Acids Res. 25:3389-3402, 1977; and Altschul et al., J. Mol. Biol. 215:403-410, 1990, respectively. Software for performing BLAST analyses is publicly available through the National Center for Biotechnology Information. This algorithm involves first identifying high scoring sequence pairs (HSPs) by identifying short words of length W in the query sequence, which either match or satisfy some positive-valued threshold score T when aligned with a word of the same length in a database sequence. T is referred to as the neighborhood word score threshold (Altschul et al., supra). These initial neighborhood word hits act as seeds for initiating searches to find longer HSPs containing them. The word hits are extended in both directions along each sequence for as far as the cumulative alignment score can be increased. Cumulative scores are calculated using, for nucleotide sequences, the parameters M (reward score for a pair of matching residues; always >0) and N (penalty score for mismatching residues; always <0). For amino acid sequences, a scoring matrix is used to calculate the cumulative score. Extension of the word hits in each direction are halted when: the cumulative alignment score falls off by the quantity X from its maximum achieved value; the cumulative score goes to zero or below, due to the accumulation of one or more negative-scoring residue alignments; or the end of either sequence is reached. The BLAST algorithm parameters W, T, and X determine the sensitivity and speed of the alignment. The BLASTN program (for nucleotide sequences) uses as defaults a word length (W) of 11, an expectation (E) or 10, M=5, N=−4 and a comparison of both strands. For amino acid sequences, the BLASTP program uses as defaults a word length of 3, and expectation (E) of 10, and the BLOSUM62 scoring matrix (see Henikoff and Henikoff, (1989) Proc. Natl. Acad. Sci. USA 89:10915) alignments (B) of 50, expectation (E) of 10, M=5, N=−4, and a comparison of both strands.

[0442] The BLAST algorithm also performs a statistical analysis of the similarity between two sequences (see, e.g., Karlin and Altschul, Proc. Natl. Acad. Sci. USA 90:5873-5787, 1993). One measure of similarity provided by the BLAST algorithm is the smallest sum probability (P(N)), which provides an indication of the probability by which a match between two nucleotide or amino acid sequences would occur by chance. For example, a nucleic acid is considered similar to a reference sequence if the smallest sum probability in a comparison of the test nucleic acid to the reference nucleic acid is less than about 0.2, more preferably less than about 0.01, and most preferably less than about 0.001.

[0443] The percent identity between two amino acid sequences can also be determined using the algorithm of E. Meyers and W. Miller, Comput. Appl. Biosci. 4:11-17, 1988) which has been incorporated into the ALIGN program (version 2.0), using a PAM120 weight residue table, a gap length penalty of 12 and a gap penalty of 4. In addition, the percent identity between two amino acid sequences can be determined using the Needleman and Wunsch, J. Mol. Biol. 48:444-453, 1970) algorithm which has been incorporated into the GAP program in the GCG software package (available at www.gcg.com), using either a Blossom 62 matrix or a PAM250 matrix, and a gap weight of 16, 14, 12, 10, 8, 6, or 4 and a length weight of 1, 2, 3, 4, 5, or 6.

[0444] Other than percentage of sequence identity noted above, another indication that two nucleic acid sequences or polypeptides are substantially identical is that the polypeptide encoded by the first nucleic acid is immunologically cross reactive with the antibodies raised against the polypeptide encoded by the second nucleic acid, as described below. Thus, a polypeptide is typically substantially identical to a second polypeptide, for example, where the two peptides differ only by conservative substitutions. Another indication that two nucleic acid sequences are substantially identical is that the two molecules or their complements hybridize to each other under stringent conditions, as described below. Yet another indication that two nucleic acid sequences are substantially identical is that the same primers can be used to amplify the sequence.

[0445] The term “nucleic acid” is used herein interchangeably with the term “polynucleotide” and refers to deoxyribonucleotides or ribonucleotides and polymers thereof in either single- or double-stranded form. The term encompasses nucleic acids containing known nucleotide analogs or modified backbone residues or linkages, which are synthetic, naturally occurring, and non-naturally occurring, which have similar binding properties as the reference nucleic acid, and which are metabolized in a manner similar to the reference nucleotides. Examples of such analogs include, without limitation, phosphorothioates, phosphoramidates, methyl phosphonates, chiral-methyl phosphonates, 2-O-methyl ribonucleotides, peptide-nucleic acids (PNAs).

[0446] Unless otherwise indicated, a particular nucleic acid sequence also implicitly encompasses conservatively modified variants thereof (e.g., degenerate codon substitutions) and complementary sequences, as well as the sequence explicitly indicated. Specifically, as detailed below, degenerate codon substitutions may be achieved by generating sequences in which the third position of one or more selected (or all) codons is substituted with mixed-base and/or deoxyinosine residues (Batzer et al., (1991) Nucleic Acid Res. 19:5081; Ohtsuka et al., (1985) J. Biol. Chem. 260:2605-2608; and Rossolini et al., (1994) Mol. Cell. Probes 8:91-98).

[0447] The term “operably linked” in the context of nucleic acids refers to a functional relationship between two or more polynucleotide (e.g., DNA) segments. Typically, it refers to the functional relationship of a transcriptional regulatory sequence to a transcribed sequence. For example, a promoter or enhancer sequence is operably linked to a coding sequence if it stimulates or modulates the transcription of the coding sequence in an appropriate host cell or other expression system. Generally, promoter transcriptional regulatory sequences that are operably linked to a transcribed sequence are physically contiguous to the transcribed sequence, i.e., they are cis-acting. However, some transcriptional regulatory sequences, such as enhancers, need not be physically contiguous or located in close proximity to the coding sequences whose transcription they enhance.

[0448] The terms “polypeptide” and “protein” are used interchangeably herein to refer to a polymer of amino acid residues. The terms apply to amino acid polymers in which one or more amino acid residue is an artificial chemical mimetic of a corresponding naturally occurring amino acid, as well as to naturally occurring amino acid polymers and non-naturally occurring amino acid polymer. Unless otherwise indicated, a particular polypeptide sequence also implicitly encompasses conservatively modified variants thereof.

[0449] The term “immunoconjugate” or “antibody conjugate” as used herein refers to the linkage of an antibody or an antibody fragment thereof with another agent, such as a chemotherapeutic agent, a toxin, an immunotherapeutic agent, an imaging probe, a spectroscopic probe, and the like. The linkage can be covalent bonds, or non-covalent interactions such as through electrostatic forces. Various linkers, known in the art, can be employed in order to form the immunoconjugate. Additionally, the immunoconjugate can be provided in the form of a fusion protein that may be expressed from a polynucleotide encoding the immunoconjugate. As used herein, “fusion protein” refers to proteins created through the joining of two or more genes or gene fragments which originally coded for separate proteins (including peptides and polypeptides). Translation of the fusion gene results in a single protein with functional properties derived from each of the original proteins.

[0450] The term “subject” includes human and non-human animals. Non-human animals include all vertebrates, e.g., mammals and non-mammals, such as non-human primates, sheep, dog, cow, chickens, amphibians, and reptiles. Except when noted, the terms “patient” or “subject” are used herein interchangeably.

[0451] The term “cytotoxin”, or “cytotoxic agent” as used herein, refer to any agent that is detrimental to the growth and proliferation of cells and may act to reduce, inhibit, or destroy a cell or malignancy.

[0452] The term “anti-cancer agent” as used herein refers to any agent that can be used to treat a cell proliferative disorder such as cancer, including but not limited to, cytotoxic agents, chemotherapeutic agents, radiotherapy and radiotherapeutic agents, targeted anti-cancer agents, and immunotherapeutic agents.

[0453] The term “terminal group (TG)” as used herein refers to a chemical moiety or a surface that is conjugated to the antibody or antibody fragment of the invention. For example, a terminal group can be a drug moiety selected from an anti-cancer agent, an anti-inflammatory agent, an antifungal agent, an antibacterial agent, an anti-parasitic agent, an anti-viral agent, an anesthetic agent. In certain embodiments a drug moiety is selected from a V-ATPase inhibitor, a HSP90 inhibitor, an IAP inhibitor, an mTor inhibitor, a microtubule stabilizer, a microtubule destabilizers, an auristatin, a dolastatin, a maytansinoid, a MetAP (methionine aminopeptidase), an inhibitor of nuclear export of proteins CRM1, a DPPIV inhibitor, an inhibitors of phosphoryl transfer reactions in mitochondria, a protein synthesis inhibitor, a kinase inhibitor, a CDK2 inhibitor, a CDK9 inhibitor, a proteasome inhibitor, a RNA polymerase inhibitor, an Eg5 inhibitor, an HDAC inhibitor, a DNA damaging agent, a DNA alkylating agent, a DNA intercalator, a DNA minor groove binder and a DHFR inhibitor. Suitable examples include auristatins such as MMAE and MMAF; calicheamycins such as gamma-calicheamycin; and maytansinoids such as DM1 and DM4. Methods for attaching each of these to a linker compatible with the antibodies and method of the invention are known in the art. See, e.g., Singh et al., Therapeutic Antibodies: Methods and Protocols, vol. 525, 445-457 (2009). In addition a terminal group can be a biophysical probe, a fluorophore, a spin label, an infrared probe an affinity probe, a chelator, a spectroscopic probe, a radioactive probe, a lipid molecule, a polyethylene glycol, a polymer, a spin label, DNA, RNA, a protein, a peptide, a surface, an antibody, an antibody fragment, a nanoparticle, a quantum dot, a liposome, a PLGA particle, or a polysaccharide. In embodiments wherein the terminal group is a surface, such solid supports include, but are not limited to, glass, cellulose, polyacrylamide, nylon, polystyrene, polyvinyl chloride or polypropylene.

[0454] “Tumor” refers to neoplastic cell growth and proliferation, whether malignant or benign, and all pre-cancerous and cancerous cells and tissues.

[0455] The term “anti-tumor activity” means a reduction in the rate of tumor cell proliferation, viability, or metastatic activity. A possible way of showing anti-tumor activity is to show a decline in growth rate of abnormal cells that arises during therapy or tumor size stability or reduction. Such activity can be assessed using accepted in vitro or in vivo tumor models, including but not limited to xenograft models, allograft models, MMTV models, and other known models known in the art to investigate anti-tumor activity.

[0456] The term “malignancy” refers to a non-benign tumor or a cancer. As used herein, the term “cancer” includes a malignancy characterized by deregulated or uncontrolled cell growth. Exemplary cancers include: carcinomas, sarcomas, leukemias, and lymphomas.

[0457] The term “cancer” includes primary malignant tumors (e.g., those whose cells have not migrated to sites in the subject's body other than the site of the original tumor) and secondary malignant tumors (e.g., those arising from metastasis, the migration of tumor cells to secondary sites that are different from the site of the original tumor).

[0458] The term “insertion” in the context of inserting a peptide tag into an antibody means the incorporation of a peptide tag between two specific residues of an antibody. The total number of residues of the antibody is increased by the number of inserted tag residues.

[0459] The term “grafting” in the context of incorporating a peptide tag into an antibody refers to the incorporation of a peptide tag into an antibody by mutagenesis. For instance, a short stretch of amino acid residues within a non-CDR loop is substituted by a peptide sequence. In this case, the total number of residues of the antibody remains unchanged. In some embodiments, the term “grafting” also encompasses a combination of substitution and insertion of peptide tag residues. For example, one part of the peptide tag is incorporated by substitution of structural loop residues, while the remaining part is inserted between specific residues of the non-CDR loop. The total number of residues of the IgG antibody is increased by a number that is smaller than the number of tag residues,

### BRIEF DESCRIPTION OF THE FIGURES

[0460] FIG. 1. Schematic description of 4′-phosphopantetheinyl transferase (PPTase)-mediated generation of ADCs.

[0461] FIG. 2. Design of IgG1 constructs which contain peptide tags for site-specific antibody labeling via post-translational 4′-phosphopantetheinylation. (A) IgG1 constructs contain peptide tags (underlined) in the V_{H}, CH1, and CH3 domains. (B) IgG1 constructs contain peptide tags (underlined) in the CH3, V_{L}, and C_{L} domains. Designed constructs that were successfully cloned are marked by a plus (+) sign in the left column. Unsuccessful cloning is indicated by a minus (−) sign. Successfully cloned constructs are grouped as non-expressors (−) and expressors (+) (middle column). Expressors which do not show any detectable Sfp-catalyzed product formation in the presence of CoA-MC-MMAF substrate (acetyl CoA substrate was used for SEQ ID NOs: 28, 105, 118, 120, 123, and 126) are marked with a minus (−) sign in the right column. Very low but detectable formation of the respective MC-MMAF ADC is indicated with a plus (+) symbol. Significantly more efficient but non-quantitative MC-MMAF ADC formation is indicated by a double plus (++) sign. Quantitatively generated MC-MMAF ADCs with two terminal groups (TGs) are classified with a triple plus (+++) rating (according to HPLC analysis). The residue positions disclosed in FIG. 2(A) and FIG. 2(B) are the indicated ‘residues of’ the corresponding SEQ ID NO according to the Eu numbering system for each sequence.

[0462] FIG. 2(A) discloses residues 1-68 of SEQ ID NO: 1130, residues 1-80 of SEQ ID NO: 94, residues 1-79 of SEQ ID NO: 95, residues 1-80 of SEQ ID NO: 96, residues 1-72 of SEQ ID NO: 1130, residues 1-80 of SEQ ID NO: 99, residues 1-79 of SEQ ID NO: 97, residues 1-77 of SEQ ID NO: 98, residues 122-198 of SEQ ID NO: 1130, residues 1-77 of SEQ ID NO: 100, residues 1-77 of SEQ ID NO: 102, residues 1-77 of SEQ ID NO: 101, residues 1-77 of SEQ ID NO: 105, residues 1-77 of SEQ ID NO: 107, residues 122-190 of SEQ ID NO: 1130, residues 1-76 of SEQ ID NO: 108, residues 1-75 of SEQ ID NO: 103, residues 1-74 of SEQ ID NO: 106, residues 164-231 of SEQ ID NO: 1130, residues 43-115 of SEQ ID NO: 118, residues 43-115 of SEQ ID NO: 110, residues 43-114 of SEQ ID NO: 113, residues 164-240 of SEQ ID NO: 1130, residues 43-119 of SEQ ID NO: 119, residues 43-119 of SEQ ID NO: 109, residues 43-119 of SEQ ID NO: 112, residues 43-119 of SEQ ID NO: 111, residues 43-119 of SEQ ID NO: 114, residues 43-119 of SEQ ID NO: 115, residues 43-119 of SEQ ID NO: 116, residues 43-119 of SEQ ID NO: 117, residues 324-400 of SEQ ID NO: 1130, residues 203-279 of SEQ ID NO: 123, and residues 203-279 of SEQ ID NO: 120, all respectively, in order of appearance.

[0463] FIG. 2(B) discloses residues 324-388 of SEQ ID NO: 1130, residues 203-278 of SEQ ID NO: 122, residues 203-279 of SEQ ID NO: 121, residues 373-449 of SEQ ID NO: 1130, residues 252-328 of SEQ ID NO: 124, residues 252-328 of SEQ ID NO: 125, residues 252-328 of SEQ ID NO: 135, residues 252-328 of SEQ ID NO: 137, residues 252-328 of SEQ ID NO: 138, residues 373-444 of SEQ ID NO: 1130, residues 252-328 of SEQ ID NO: 134, residues 390-449 of SEQ ID NO: 1130, residues 269-340 of SEQ ID NO: 127, residues 269-335 of SEQ ID NO: 126, residues 269-339 of SEQ ID NO: 129, residues 269-337 of SEQ ID NO: 131, residues 269-338 of SEQ ID NO: 130, residues 269-340 of SEQ ID NO: 132, residues 269-340 of SEQ ID NO: 136, residues 383-449 of SEQ ID NO: 1130, residues 262-341 of SEQ ID NO: 140, residues 262-340 of SEQ ID NO: 139, residues 262-340 of SEQ ID NO: 141, residues 1-68 of SEQ ID NO: 1131, residues 1-80 of SEQ ID NO: 26, residues 1-79 of SEQ ID NO: 27, residues 76-152 of SEQ ID NO: 1131, residues 76-160 of SEQ ID NO: 30, residues 150-214 of SEQ ID NO: 1131, residues 42-117 of SEQ ID NO: 29, and residues 42-118 of SEQ ID NO: 28, all respectively, in order of appearance.

[0464] FIG. 3. (A) Sequence of CH1 domain, CH2 domain, CH3 domain, and hinge region of the Ig gamma 1 heavy chain (SEQ ID NO:93). (B) Sequence of C_{L} domain of the Ig kappa light chain (SEQ ID NO:24). Underlined amino acids are structural loops. Amino acid positions are numbered according to the Eu numbering system as described in Edelman et al., Proc. Natl. Acad. USA 63:78-85 (1969). X′₁, X′₂, X′₃, X′₄, X′₅, and X′₆ indicate residues that are present at allotypic positions within the IgG1 subclass and the kappa isotype (according to Jefferis et al., MAbs. 1:332-338 (2009)).

[0465] FIG. 4. (A) Sequence alignment of CH1 domain, CH2 domain, CH3 domain, and hinge region of the four human Ig gamma subclasses with Trastuzumab (SEQ ID NOs 1109-1113, respectively, in order of appearance). (B) Sequence alignment of C_{L} domain with Trastuzumab (SEQ ID NOs 1114-1115, respectively, in order of appearance). Underlined residues belong to structural loops (see also FIG. 3). Boxed residues indicate allotypic positions according to Jefferis et al., MAbs. 1:332-338 (2009). For simplicity, only the allotypic positions within the IgG1 subclass and the kappa isotype are shown. Protein sequences of the human Ig gamma subclasses and the human kappa isotype are derived from the UniProt database (entry numbers P01857, P01859, P01860, P01861, and P01834).

[0466] FIG. 5. HPLC characterization of Sfp-catalyzed ADC formation. (A) HPLC trace confirming the near quantitative formation of the immunoconjugate anti-hHER2-HC-T359-GDS-ppan-MC-MMAF-LSWLLRLLN-K360 (SEQ ID NO:1117). (B) HPLC trace confirming the near quantitative formation of the immunoconjugate anti-hHER2-HC-E388-GDS-ppan-MC-MMAF-LSWLLRLLN-N389 (SEQ ID NO:1118). (C)HPLC trace confirming the near quantitative formation of the immunoconjugate anti-hHER2-HC-V2-DS-ppan-MC-MMAF-LEFIASKLA-Q3 (SEQ ID NO:1119). (D) HPLC trace confirming the quantitative formation of the immunoconjugate anti-hHER2-HC-V2-GDS-ppan-MC-MMAF-LSWLLRLLN-Q3 (SEQ ID NO:1120). (E) HPLC trace confirming the near quantitative formation of the immunoconjugate anti-hHER2-HC-E388-DS-ppan-MC-MMAF-LEFIASKL-N389 (SEQ ID NO:1121). (F) HPLC trace confirming the quantitative formation of the immunoconjugate anti-hHER2-HC-E388-DS-ppan-MC-MMAF-LEFIASKLA-N389 (SEQ ID NO:1122). (G) HPLC trace confirming the near quantitative formation of the immunoconjugate mAb2-HC-T359-GDS-ppan-MC-MMAF-LSWLLRLLN-K360 (SEQ ID NO:1123). (H)HPLC trace exemplifying partial formation of the immunoconjugate anti-hHER2-LC-12-DS-ppan-MC-MMAF-LEFIASKLA-Q3 (SEQ ID NO:1124).

[0467] FIG. 6. Characterization of three trastuzumab immunoconjugates by analytical size-exclusion chromatography (AnSEC) exemplifies the formation of monomeric, non-aggregated ADCs. (A) AnSEC analysis of the immunoconjugate anti-hHER2-HC-V2-GDS-ppan-MC-MMAF-LSWLLRLLN-Q3 (SEQ ID NO:1120). (B) AnSEC analysis of the immunoconjugate anti-hHER2-HC-E388-DS-ppan-MC-MMAF-LEFIASKLA-N389 (SEQ ID NO:1122). (C) AnSEC analysis of the immunoconjugate anti-hHER2-HC-E388-DS-ppan-MC-MMAF-LEFIASKL-N389 (SEQ ID NO:1121).

[0468] FIG. 7. HPLC characterization of unsuccessful labeling of trastuzumab with incorporation of a peptide tag at a specific location. HPLC trace indicating no conjugation between anti-hHER2-HC-S190D-S191-S192L-L193E-G194F-T195I-Q196A-T197S-Y198K-I199L (SEQ ID NO:114) and CoA-MC-MMAF.

[0469] FIG. 8. HPLC characterization of the labeling of mixed grafting/insertion constructs with CoA-MC-MMAF. (A) HPLC trace indicating partial formation of the immunoconjugate anti-hHER2-HC-S63-ppan-MC-MMAF-V64L-EFIASKLA-K65 (SEQ ID NO:1125). (B) HPLC trace indicating no formation of the immunoconjugate anti-hHER2-LC-S76D-S77-ppan-MC-MMAF-L78-EFIASKLA-Q79 (SEQ ID NO:1126).

[0470] FIG. 9. HPLC characterization of fluorophore attachment to IgGs. (A) HPLC trace confirming the near quantitative formation of the antibody-fluorophore conjugate anti-hHER2-HC-P189G-S190D-S191-ppan-maleimidoethylamido-TMR-S192L-L193S-G194W-T195L (SEQ ID NO:1127). The extensive overlap between the HPLC traces monitored at 280 and 555 nm indicates near quantitative fluorophore conjugation. (B) HPLC trace confirming the near quantitative formation of the antibody-fluorophore conjugate anti-hHER2-HC-T359-GDS-ppan-maleimidoethylamido-TMR-LSWLLRLLN-K360 (SEQ ID NO:1128). The extensive overlap between the HPLC traces monitored at 280 and 555 nm indicates near quantitative fluorophore conjugation.

[0471] FIG. 10. HPLC characterization of antibody labeling with hydrolyzed maleimido- or bromoacetyl thioether-linked cytotoxins. (A) HPLC trace confirming the near quantitative conjugation of maleimide-ring-opened CoA-MC-MMAF to anti-hHER2-HC-T359-GDSLSWLLRLLN-K360 (SEQ ID NO:121). (B) HPLC trace confirming the near quantitative conjugation of CoA-Ac-Ahx-MMAF to anti-hHER2-HC-T359-GDSLSWLLRLLN-K360 (SEQ ID NO:121).

[0472] FIG. 11. HPLC characterization of antibody labeling with cytotoxins connected via a cleavable linker. (A) HPLC trace confirming the near quantitative conjugation of CoA-MC-Val-Cit-PABC-MMAF to anti-hHER2-HC-T359-GDSLSWLLRLLN-K360 (SEQ ID NO:121). (B) HPLC trace confirming the near quantitative conjugation of CoA-MC-Val-Cit-PABC-MMAF to anti-hHER2-HC-E388-GDSLSWLLRLLN-N389 (SEQ ID NO:127).

[0473] FIG. 12. Optimization of 4′-phosphopantetheinyl transferase (PPTase)-catalyzed ADC formation as a function of pH. The bar graph representation shows the amount of generated ADC with a drug-to-antibody ratio (DAR) of 2 as a function of pH. The data is based on the HPLC analysis (280 nm) of the reaction of CoA-MC-MMAF with either anti-hHER2-HC-T359-GDSLSWLLRLLN-K360 (SEQ ID NO:121) or anti-hHER2-HC-E388-GDSLSWLLRLLN-N389 (SEQ ID NO:127) at a pH range of 5.0 to 10.0.

[0474] FIG. 13. Optimization of conjugation reaction as a function of Sfp enzyme concentration in 50 mM HEPES buffer (pH 7.5) containing 2.5 μM antibody, 50 μM CoA-MC-MMAF, and 10 mM MgCl₂ (37° C., 16 hours). (A) Deconvoluted mass spectrum showing primarily unconjugated anti-hHER2-HC-E388-GDSLSWLLRLLN-N389 (SEQ ID NO:127) at an Sfp concentration of 0.1 μM. (B) Deconvoluted mass spectrum showing near quantitative ADC formation of anti-hHER2-HC-E388-GDS-ppan-MC-MMAF-LSWLLRLLN-N389 (SEQ ID NO:1118) at an Sfp concentration of 0.25 μM. (C) Deconvoluted mass spectrum showing near quantitative ADC formation of anti-hHER2-HC-E388-GDS-ppan-MC-MMAF-LSWLLRLLN-N389 (SEQ ID NO:1118) at an Sfp concentration of 0.5 μM.

[0475] FIG. 14. Optimization of enzymatic conjugation reaction as a function of CoA-MC-MMAF substrate concentration at pH 8.0. (A) The HPLC traces represent three conjugation reactions with 2.5 μM anti-hHER2-HC-E388-GDSLSWLLRLLN-N389 (SEQ ID NO:127) that contained 2.5 μM (top trace), 7.5 μM (middle trace), or 25 μM (bottom trace) of CoA-MC-MMAF. The peak at a retention time of 4.9 min corresponds to unlabeled antibody (DAR=0), the peak at 5.3 min to mono-labeled antibody (DAR=1), and the peak at 5.7 min to bi-labeled antibody (DAR=2). (B) The bar graph representation shows the amount of generated ADC with a DAR of 2 as a function of CoA-MC-MMAF substrate concentration. The titration series was performed at an Sfp enzyme concentration of either 0.25 μM (black bars) or 1.0 μM (white bars).

[0476] FIG. 15. Thermal stability of peptide-tagged ADCs as measured by differential scanning fluorometry (DSF) using SYPRO Orange gel stain. (A) Determination of the thermal stability of the immunoconjugate anti-hHER2-HC-T359-GDS-ppan-MC-MMAF-LSWLLRLLN-K360 (SEQ ID NO:1117). Two transition temperatures of 68.5 and 81.5 degrees Celsius are observed by DSF (average of two measurements). (B) Determination of the thermal stability of the immunoconjugate anti-hHER2-HC-E388-GDS-ppan-MC-MMAF-LSWLLRLLN-N389 (SEQ ID NO:1118). Two transition temperatures of 66.3 and 81.0 degrees Celsius are observed by DSF (single measurement). (C) Determination of the thermal stability of unmodified Trastuzumab IgG1 (anti-hHER2) which was used as reference for comparison with peptide-tagged ADCs. Two transition temperatures of 69.7 and 81.1 degrees Celsius are observed by DSF (average of two measurements).

[0477] FIG. 16. Pharmacokinetic (PK) study of two peptide-tagged Trastuzumab immunoconjugates. Plasma titers of both ADCs were determined by capturing the respective immunoconjugates with plate-absorbed human HER2 (extracellular domains 3-4) followed by detection with anti-human IgG and anti-MMAF antibodies. (A) Comparison of plasma titers of anti-hHER2-HC-T359-GDS-ppan-MC-MMAF-LSWLLRLLN-K360 (SEQ ID NO:1117) and unmodified Trastuzumab (anti-hHER2) antibody by ELISA. The plasma titer of the immunoconjugate exhibits a rapid decay within 4 days. (B) Comparison of plasma titers of anti-hHER2-HC-E388-GDS-ppan-MC-MMAF-LSWLLRLLN-N389 (SEQ ID NO:1118) and unmodified Trastuzumab (anti-hHER2) antibody by ELISA. The plasma titer of the immunoconjugate closely parallels the control titer of the unmodified anti-hHER2 antibody within a 14 day period.

[0478] FIG. 17. In vitro cell-killing assay of peptide-tagged immunoconjugates using the HER2-expressing MDA-231 cell line. Plots are based on cell viability measurements using the Cell Titer Glo Luminescent Cell Viability Assay (Promega). Figure discloses ‘anti-hHER2-HC-T359-GDS-ppan-MC-MMAF-LSWLLRLLN-K360,’ ‘anti-hHER2-HC-E388-GDS-ppan-MC-MMAF-LSWLLRLLN-N389,’ ‘anti-hHER2-HC-T359-GDS-ppan-MC-ValCit-PABC-MMAF-LSWLLRLLN-K360,’ and ‘anti-hHER2-HC-E388-GDS-ppan-MC-ValCit-PABC-MMAF-LSWLLRLLN-N389’ as SEQ ID NOS 1117, 1118, 1108, and 1107, respectively.

[0479] FIG. 18. Plot illustrating the influence of peptide tag insertion site on IgG antibody thermal stability. According to differential scanning fluorometry (DSF) using SYPRO Orange gel stain, the first transition temperature (Tm1) is significantly decreased for antibodies containing peptide tag insertions in the CH2 domain of the Fc region (amino acid residues 228-340). In contrast to that, peptide tag insertions in the CH1 domain of the Fab region destabilize the antibody scaffold to a much lesser extent, with Tm1 values generally not more than 3 degree Celcius lower than unmodified Trastuzumab IgG1 with a Tm1 of 69.7° C.

[0480] FIG. 19. Enzymatic generation of ADCs with a DAR of 4. (A) ADCs with a DAR of 4 can be generated by incorporating multiple peptide tags into an antibody, such as the ybbR— and the S6-tags. (B) HPLC analysis of Sfp-catalyzed conjugation of CoA-MC-MMAF to Trastuzumab IgG containing an S6 tag in the V_{H} domain as well as a ybbR tag in the CH3 domain (anti-hHER2-HC-V2-GDSLSWLLRLLN-Q3-E388-DSLEFIASKLA-N389 (SEQ ID NO:142)). Room temperature incubation of 2.5 μM of antibody and 50 μM of CoA substrate in the presence of 1 μM of Sfp enzyme leads to near quantitative formation of an ADC with a DAR of 4 (t_{R}=6.1 min, bottom trace). The top trace represents the corresponding uncoupled antibody (DAR=0, t_{R}=5.2 min).

[0481] FIG. 20. Pharmacokinetic profiles of peptide-tagged trastuzumab immunoconjugates displaying high and low AUC IgG values. Each of the six peptide-tagged ADCs corresponding to SEQ ID NO:248 (A), SEQ ID NO:33 (B), SEQ ID NO:251 (C), SEQ ID NO:218 (D), SEQ ID NO:202 (E), and SEQ ID NO:244 (F) was administered intravenously into three mice at a single dose of 1 mg/kg. After collection of plasma samples over a time period of 340 hours, trastuzumab ADC molecules were captured by using the immobilized extracellular domain of human HER2. Plasma titers were then determined by two ELISA formats based on either anti-MMAF or anti-hIgG antibodies. While the first format provides readout on the concentration of “intact” ADC, the latter format generates a signal proportional to the concentration of total IgG, comprising both conjugated and unconjugated trastuzumab molecules. A C exemplify PK curves of peptide-tagged MMAF ADCs displaying high AUC IgG values, whereas D F show examples of immunoconjugates exhibiting very low AUC IgG values. In all cases, anti-MMAF and anti-hIgG titers closely parallel each other indicating negligible deconjugation of the MMAF payload during the time course of the PK study.

[0482] FIG. 21. Correlation between anti-MMAF and anti-hIgG titers of 86 peptide-tagged ADCs. According to this plot, the concentration readouts of total IgG and “intact” ADC are in close agreement to each other, thereby suggesting a highly stable ppan-MC linkage between MMAF payload and peptide-tagged antibody. Besides negligible deconjugation of the MMAF drug in vivo, this highly linear correlation also indicates that covalent payload attachment does not negatively affect the pharmacokinetic profile of the immunoconjugate.

[0483] FIG. 22. Two-step method involving the post-translational modification of an A1-tagged antibody with a carbonyl-functionalized CoA analogue for subsequent attachment of the terminal group (TG) via oxime ligation. In the first step, the A1-tagged antibody is site-specifically labeled with a ketone- or aldehyde-functionalized CoA analogue in cell-culture medium. Following protein A affinity chromatography, the carbonyl group of the ppan moiety is reacted with an aminooxy-derivatized TG.

[0484] FIG. 23. In vivo efficacy study of the ybbR-tagged trastuzumab ADC anti-hHER2-HC-E388-DS-ppan-MC-MMAF-LEFIASKLA-N389 (SEQ ID NO: 1122) in immune-deficient nude mice implanted with a human tumor cell line. The xenograft tumor model was performed with nu/nu mice which were subcutaneously administered with the HER2-dependent breast cancer cell line MDA-MB231 clone 16. After the tumor has grown to a size of about 200 mm³, single doses of 3 mg/kg (▴), 5 mg/kg () of the ybbR-tagged ADC or vehicle alone (▪) were intravenously injected into nine mice per treatment group. The vertical arrow indicates the time point of ADC administration. Weekly monitoring of tumor growth revealed that both dose levels resulted in tumor regression demonstrating in vivo efficacy of the peptide-tagged ADC.

### DETAILED DESCRIPTION

[0485] The present invention provides methods of site-specific labeling of antibodies, using proteins having 4′-phosphopantetheinyl transferase activity (“PPTases”) that catalyze post-translational modification of peptide sequences (“peptide tags”) incorporated into one or more specific sites of an antibody of interest. Enzymatic labeling under ambient reaction conditions enables quantitative and irreversible covalent modification of a specific serine residue within the peptide tags incorporated into the antibody, and thus creates desirable antibody conjugates.

[0486] Given the broad substrate tolerance of PPTases, site-specific antibody labeling according to the present invention can be achieved with a variety of chemically accessible labeling reagents, such as anti-cancer agents, fluorophores, peptides, sugars, detergents, polyethylene glycols, immune potentiators, radio-imaging probes, prodrugs, and other molecules. Furthermore, PPTases can be used to immobilize peptide-tagged antibodies on solid support, such as polystyrene nanoparticles and gold surfaces (see, e.g., Wong et al., Org. Biomol. Chem. 8: 782-787, 2010; Wong et al., Nanoscale 4:659-666, 2012, for methodology of immobilization of functional enzymes).

[0487] Accordingly, the present invention provides methods of preparation of homogeneous immunoconjugates with a defined drug-to-antibody ratio for use in cancer therapy, and immunoconjugates prepared thereby, as well as pharmaceutical compositions comprising these immunoconjugates. The methods of the instant invention can be used in combination with other conjugation methods known in the art.

### 1. Antibody Engineering

### Site-Specific Labeling

[0488] A “structural loop” or “non-CDR-loop” according to the present invention is to be understood in the following manner: antibodies are made of domains with immunoglobulin folds. In essence, anti-parallel beta sheets are connected by loops to form a compressed antiparallel beta barrel. In the variable region, some of the loops of the domains contribute essentially to the specificity of the antibody, i.e., the binding to an antigen. These loops are called “CDR-loops.” All other loops of antibody domains are rather contributing to the structure of the molecule and/or the effector function. These loops are defined herein as “structural loops” or “non-CDR-loops.”

[0489] The antibodies (e.g., a parent or native antibody, optionally containing one or more non-naturally occurring amino acids) of the present invention are numbered according to the Eu numbering system as set forth in Edelman et al., Proc. Natl. Acad. USA 63:78-85 (1969). Human IgG1 constant region is used as a representative throughout the application. However, the invention is not limited to human IgG1; corresponding amino acid positions can be readily deduced by sequence alignment. For example, FIG. 3 (A) shows IgG1 heavy chain constant region where the structural loops are underlined, these underlined structural loops can be readily identified for IgG2, IgG3, and IgG4 as shown in the sequence alignment of FIG. 4 (A). FIG. 3 (B) shows the light chain constant region where the structural loops are underlined. For the light chain constant region, IgG1, IgG2, IgG3 and IgG4 are the same. Table 1 below lists the amino acid positions in the structural loop of IgG1, IgG2, IgG3 and IgG4, respectively.

TABLE 1
Identified Structural Loop Positions (IgG1 according to Eu numbering)

| | IgG1 | IgG2 | IgG3 | IgG4 |
|---|---|---|---|---|
| Heavy | 119(S)120(T)121(K) | 119(S)120(T)121(K) | 119(S)120(T)121(K) | 119(S)120(T)121(K) |
| Chain | 131(S)132(S)133(K) | 131(C)132(S)133(R) | 131(C)132(S)133(R) | 131(C)132(S)133(R) |
| | 134(S)135(T)136(S) | 134(S)135(T)136(S) | 134(S)135(T)136(S) | 134(S)135(T)136(S) |
| | 137(G)138(G)139(T) | 137(E)138(S)139(T) | 137(G)138(G)139(T) | 137(E)138(S)139(T) |
| | (SEQ ID NO: 1018) | (SEQ ID NO: 1019) | (SEQ ID NO: 1020) | (SEQ ID NO: 1019) |
| | 152(E)153(P)154(V) | 152(E)153(P)154(V) | 152(E)153(P)154(V) | 152(E)153(P)154(V) |
| | 159(N)160(S)161(G) | 159(N)160(S)161(G) | 159(N)160(S)161(G) | 159(N)160(S)161(G) |
| | 162(A)163(L)164(T) | 162(A)163(L)164(T) | 162(A)163(L)164(T) | 162(A)163(L)164(T) |
| | 165(S)166(G) (SEQ | 165(S)166(G) (SEQ | 165(S)166(G) (SEQ | 165(S)166(G) (SEQ |
| | ID NO: 1021) | ID NO: 1021) | ID NO: 1021) | ID NO: 1021) |
| | 171(P)172(A) | 171(P)172(A) | 171(P)172(A) | 171(P)172(A) |
| | 176(S)177(S)178(G) | 176(S)177(S)178(G) | 176(S)177(S)178(G) | 176(S)177(S)178(G) |
| | 189(P)190(S)191(S) | 189(P)190(S)191(S) | 189(P)190(S)191(S) | 189(P)190(S)191(S) |
| | 192(S)193(L)194(G) | 192(N)193(F)194(G) | 192(S)193(L)194(G) | 192(S)193(L)194(G) |
| | 195(T)196(Q)197(T) | 195(T)196(Q)197(T) | 195(T)196(Q)197(T) | 195(T)196(K)197(T) |
| | (SEQ ID NO: 1022) | (SEQ ID NO: 1023) | (SEQ ID NO: 1022) | (SEQ ID NO: 1024) |
| | 205(K)206(P)207(S) | 205(K)206(P)207(S) | 205(K)206(P)207(S) | 205(K)206(P)207(S) |
| | 208(N) (SEQ ID NO: | 208(N) (SEQ ID NO: | 208(N) (SEQ ID NO: | 208(N) (SEQ ID NO: |
| | 1025) | 1025) | 1025) | 1025) |
| | 230(P)231(A)232(P) | 227(P)228(A)229(P) | 277(P)278(A)279(P) | 227(P)228(A)229(P) |
| | 233(E)234(L)235(L) | 230(P)231(V)232(A) | 280(E)281(L)282(L) | 230(E)231(F)232(L) |
| | 236(G)236(G) (SEQ | 233(G) (SEQ ID NO: | 283(G)284(G) (SEQ | 233(G)234(G) (SEQ |
| | ID NO: 1026) | 1027) | ID NO: 1026) | ID NO: 1028) |
| | 244(P)245(P)246(K) | 240(P)241(P)242(K) | 291(P)292(P)293(K) | 241(P)242(P)243(K) |
| | 253(I)254(S)255(R) | 249(I)250(S)251(R) | 300(I)301(S)302(R) | 250(I)251(S)252(R) |
| | 256(T)257(P)258(E) | 252(T)253(P)254(E) | 303(T)304(P)305(E) | 253(T)254(P)255(E) |
| | (SEQ ID NO: 1029) | (SEQ ID NO: 1029) | (SEQ ID NO: 1029) | (SEQ ID NO: 1029) |
| | 267(S)268(H)269(E) | 263(S)264(H)265(E) | 314(S)315(H)316(E) | 264(S)265(Q)266(E) |
| | 270(D)271(P)272(E) | 266(D)267(P)268(E) | 317(D)318(P)319(E) | 267(D)268(P)269(E) |
| | (SEQ ID NO: 1030) | (SEQ ID NO: 1030) | (SEQ ID NO: 1030) | (SEQ ID NO: 1031) |
| | 280(D)281(G) | 276(D)277(G) | 327(D)328(G) | 277(D)278(G) |
| | 285(H)286(N)287(A) | 281(H)282(N)283(A) | 332(H)333(N)334(A) | 282(H)283(N)284(A) |
| | 291(P)292(R) | 287(P)288(R) | 338(P)339(R) | 288(P)289(R) |
| | 295(Q)296(Y)297(N) | 291(Q)292(F)293(N) | 342(Q)343(Y)344(N) | 292(Q)293(F)294(N) |
| | 298(S)299(T) (SEQ | 294(S)295(T) (SEQ | 345(S)346(T) (SEQ | 295(S)296(T) (SEQ |
| | ID NO: 1032) | ID NO: 1033) | ID NO: 1032) | ID NO: 1033) |
| | 307(T)308(V)309(L) | 303(T)304(V)305(V) | 354(T)355(V)356(L) | 304(T)305(V)306(L) |
| | 310(H)311(Q) (SEQ | 306(H)307(Q) (SEQ | 357(H)358(Q) (SEQ | 307(H)308(Q) (SEQ |
| | ID NO: 1034) | ID NO: 1035) | ID NO: 1034) | ID NO: 1034) |
| | 315(N)316(G)317(K) | 311(N)312(G)313(K) | 362(N)363(G)364(K) | 312(N)313(G)314(K) |
| | 318(E) (SEQ ID NO: | 314(E) (SEQ ID NO: | 365(E) (SEQ ID NO: | 315(E) (SEQ ID NO: |
| | 1036) | 1036) | 1036) | 1036) |
| | 326(K)327(A)328(L) | 322(K)323(G)324(L) | 373(K)374(A)375(L) | 323(K)324(G)325(L) |
| | 329(P)330(A)331(P) | 325(P)326(A)327(P) | 376(P)377(A)378(P) | 326(P)327(S)328(S) |
| | (SEQ ID NO: 1037) | (SEQ ID NO: 1038) | (SEQ ID NO: 1037) | (SEQ ID NO: 1039) |
| | 339(A)340(K)341(G) | 335(T)336(K)337(G) | 386(T)387(K)388(G) | 336(A)337(K)338(G) |
| | 342(Q)343(P)344(R) | 338(Q)339(P)340(R) | 389(Q)390(P)391(R) | 339(Q)340(P)341(R) |
| | 345(E) (SEQ ID NO: | 341(E) (SEQ ID NO: | 392(E) (SEQ ID NO: | 342(E) (SEQ ID NO: |
| | 1040) | 1041) | 1041) | 1040) |
| | 355(R)356(D/E) | 351(R)352(E)353(E) | 402(R)403(E)404(E) | 352(Q)353(E)354(E) |
| | 357(E)358(L/M) | 354(M)355(T)356(K) | 405(M)406(T)407(K) | 355(M)356(T)357(K) |
| | 359(T)360(K)361(N) | 357(N) (SEQ ID NO: | 408(N) (SEQ ID NO: | 358(N) (SEQ ID NO: |
| | (SEQ ID NO: 1042) | 1043) | 1043) | 1044) |
| | 384(N)385(G) | 380(N)381(G) | 431(S)432(G) | 381(N)382(G) |
| | 388(E)389(N)390(N) | 384(E)385(N)386(N) | 435(E)436(N)437(N) | 385(E)386(N)387(N) |
| | 394(T)395(P)396(P) | 390(T)391(P)392(P) | 441(T)442(P)443(P) | 391(T)392(P)393(P) |
| | 399(D)400(S)401(D) | 395(D)396(S)397(D) | 446(D)447(S)448(D) | 396(D)397(S)398(D) |
| | 402(G) (SEQ ID NO: | 398(G) (SEQ ID NO: | 449(G) (SEQ ID NO: | 399(G) (SEQ ID NO: |
| | 1045) | 1045) | 1045) | 1045) |
| | 415(S)416(R)417(W) | 411(S)412(R)413(W) | 462(S)463(R)464(W) | 412(S)413(R)414(W) |
| | 418(Q)419(Q)420(G) | 414(Q)415(Q)416(G) | 465(Q)466(Q)467(G) | 415(Q)416(E)417(G) |
| | 421(N)422(V) (SEQ | 417(N)418(V) (SEQ | 468(N)469(I) (SEQ | 418(N)419(V) (SEQ |
| | ID NO: 1046) | ID NO: 1046) | ID NO: 1047) | ID NO: 1048) |
| | 433(H)434(N)435(H) | 429(H)430(N)431(H) | 480(H)481(N)482(R) | 430(H)431(N)432(H) |
| | 442(S)443(L)444(S) | 438(S)439(L)440(S) | 489(S)490(L)491(S) | 439(S)440(L)441(S) |
| | 445(P)446(G) (SEQ | 441(P)442(G) (SEQ | 492(P)493(G) (SEQ | 442(L)443(G) (SEQ |
| | ID NO: 1049) | ID NO: 1049) | ID NO: 1049) | ID NO: 1050) |
| Light | 109(T)110(V)111(A) | 109(T)110(V)111(A) | 109(T)110(V)111(A) | 109(T)110(V)111(A) |
| Chain | 112(A) (SEQ ID NO: | 112(A) (SEQ ID NO: | 112(A) (SEQ ID NO: | 112(A) (SEQ ID NO: |
| | 1051) | 1051) | 1051) | 1051) |
| | 119(P)120(P)121(S) | 119(P)120(P)121(S) | 119(P)120(P)121(S) | 119(P)120(P)121(S) |
| | 122(D)123(E) (SEQ | 122(D)123(E) (SEQ | 122(D)123(E) (SEQ | 122(D)123(E) (SEQ |
| | ID NO: 1052) | ID NO: 1052) | ID NO: 1052) | ID NO: 1052) |
| | 140(Y)141(P)142(R) | 140(Y)141(P)142(R) | 140(Y)141(P)142(R) | 140(Y)141(P)142(R) |
| | 143(E)144(A) (SEQ | 143(E)144(A) (SEQ | 143(E)144(A) (SEQ | 143(E)144(A) (SEQ |
| | ID NO: 1053) | ID NO: 1053) | ID NO: 1053) | ID NO: 1053) |
| | 151(D)152(N)153(A) | 151(D)152(N)153(A) | 151(D)152(N)153(A) | 151(D)152(N)153(A) |
| | 154(L)155(Q)156(S) | 154(L)155(Q)156(S) | 154(L)155(Q)156(S) | 154(L)155(Q)156(S) |
| | (SEQ ID NO: 1054) | (SEQ ID NO: 1054) | (SEQ ID NO: 1054) | (SEQ ID NO: 1054) |
| | 161(E)162(S)163(V) | 161(E)162(S)163(V) | 161(E)162(S)163(V) | 161(E)162(S)163(V) |
| | 164(T)165(E)166(Q) | 164(T)165(E)166(Q) | 164(T)165(E)166(Q) | 164(T)165(E)166(Q) |
| | 167(D)168(S) (SEQ | 167(D)168(S) (SEQ | 167(D)168(S) (SEQ | 167(D)168(S) (SEQ |
| | ID NO: 1055) | ID NO: 1055) | ID NO: 1055) | ID NO: 1055) |
| | 197(T)198(H)199(Q) | 197(T)198(H)199(Q) | 197(T)198(H)199(Q) | 197(T)198(H)199(Q) |
| | 200(G)201(L)202(S) | 200(G)201(L)202(S) | 200(G)201(L)202(S) | 200(G)201(L)202(S) |
| | 203(S)204(P) (SEQ | 203(S)204(P) (SEQ | 203(S)204(P) (SEQ | 203(S)204(P) (SEQ |
| | ID NO: 1056) | ID NO: 1056) | ID NO: 1056) | ID NO: 1056) |
| | 207(K)208(S) | 207(K)208(S) | 207(K)208(S) | 207(K)208(S) |

[0490] FIG. 3 as well as SEQ ID NOs 24 and 93 represent the sequences of the Ig kappa light chain constant region and the Ig gamma-1 heavy chain constant region, respectively. X′₁, X′₂, X′₃, X′₄, X′₅, and X′₆ in SEQ ID NOs: 24 and 93 indicate residues that are present at allotypic positions within the IgG1 subclass and the kappa isotype (according to Jefferis et al., MAbs. 1:332-338 (2009)). X′₁ can be Arg or Lys, X′₂ can be Asp or Glu, X′₃ can be Leu or Met, X′₄ can be Ala or Gly, X′₅ can be Val or Ala, and X′₆ can be Leu or Val.

[0491] Because of the high sequence homology of constant regions of IgG1, IgG2, IgG3 and IgG4 antibodies, findings of the invention are not limited to any specific antibodies. In addition, the findings of the invention are not limited to using PPTases. The positions in the antibody structural loops identified herein can also be used for incorporating other peptide tags, which are substrates for other enzymatic conjugation approaches such as the enzyme biotin protein ligase (BPL), transglutaminases, and formylglycine forming enzymes.

[0492] In one aspect, the present invention provides immunoconjugates comprising a modified antibody or fragment thereof, and a terminal group, wherein said modified antibody or fragment thereof comprises a peptide tag that by itself is a substrate of a 4′-phosphopantetheinyl transferase, and wherein said peptide tag is located within a structural loop, or C- or N-terminus of the modified antibody or fragment thereof. The present invention also provides modified antibodies or fragments thereof comprising a peptide tag that is a substrate of a 4′-phosphopantetheinyl transferase, and wherein said peptide tag is located within a structural loop, or C- or N-terminus of the antibody or fragment thereof. In a specific embodiment, said peptide tag is one or more peptides selected from those described in Table 2. In one aspect, the peptide tag is inserted between two amino acids of a structural loop of said antibody or fragment thereof. In another aspect, the peptide tag is grafted into a structural loop, C- or N-terminus of said antibody or fragment thereof, wherein the peptide tag replaces one or more amino acids of the parent antibody or fragment thereof. In one aspect, the structural loop refers to a structural loop located at the CH1, CH2, CH3, or C_{L} region of said antibody or fragment thereof. The modified antibody heavy chain and/or light chain (or fragment thereof) may contain 1, 2, 3, 4, 5, 6, 7, 8, or more protein tags in its structural loops. In one aspect, the modified antibodies or antibody fragments contain 2, 4, 6, 8, or more protein tags in its structural loops. In another aspect, said 4′-phosphopantetheinyl transferase is Sfp, AcpS, T. maritima PPTase, human PPTase, or a mutant form thereof that retains the 4′-phosphopantetheinyl transferase activity. In one aspect, said 4′-phosphopantetheinyl transferase originates from Homo sapiens, Bacillus subtilis, Escherichia coli, Thermotoga maritima, Clostridium thermocellum, as well as any other mammalian, bacterial or fungal genome. In another aspect, said 4′-phosphopantetheinyl transferase is a homologous protein to Sfp, AcpS, T. maritima PPTase, human PPTase, or a mutant thereof. In one embodiment, said 4′-phosphopantetheinyl transferase is from a thermophilic organism. In some embodiments, the parental antibody (antibody without incorporating the peptide tag) is an IgG, IgM, IgE, or IgA antibody. In some embodiments, the parental antibody is an IgG1 antibody. In some other embodiments, the parental antibody is an IgG2, IgG3, or IgG4 antibody.

[0493] “A substrate of 4′-phosphopantetheinyl transferase” as used herein means the structure being described can serve as an acceptor for a 4′-phosphopantetheine (ppan) or modified ppan group as illustrated in Scheme 1a herein when contacted with 4′-phosphopantetheinyl transferase and CoA or a CoA analogue having a terminal group attached to it.

[0494] In one aspect, the present invention provides immunoconjugates comprising a modified antibody or fragment thereof, and a terminal group, wherein said modified antibody or fragment thereof comprises a CH1, CH2, CH3, and/or C_{L} region, and wherein said CH1, CH2, CH3, and/or C_{L} region further comprises a peptide tag that by itself is a substrate of a 4′-phosphopantetheinyl transferase. The present invention also provides modified antibodies or fragments thereof comprising a CH1, CH2, CH3, and/or C_{L} region, and wherein said CH1, CH2, CH3, and/or C_{L} region further comprises a peptide tag that is a substrate of a 4′-phosphopantetheinyl transferase. In some embodiments, said peptide tag is one or more peptides selected from those described in Table 2. In some embodiments, the peptide tag is inserted between two amino acids of a structural loop of said antibody or fragment thereof. In some embodiments, the peptide tag is grafted into a structural loop of said antibody or fragment thereof. The modified antibody heavy chain and/or light chain (or fragment thereof) may contain 1, 2, 3, 4, 5, 6, 7, 8, or more protein tags in its structural loops. In some embodiments, the modified antibodies or fragments contain 2, 4, 6, 8, or more protein tags in its structural loops. In some embodiments, said 4′-phosphopantetheinyl transferase is Sfp, AcpS, T. maritima PPTase, human PPTase, or a mutant form thereof that retains the 4′-phosphopantetheinyl transferase activity. In some embodiments, said 4′-phosphopantetheinyl transferase originates from Homo sapiens, Bacillus subtilis, Escherichia coli, Thermotoga maritima, Clostridium thermocellum, as well as any other mammalian, bacterial or fungal genome. In some embodiments, said 4′-phosphopantetheinyl transferase is a homologous protein to Sfp, AcpS, T. maritima PPTase, or a mutant thereof. In one embodiment, said 4′-phosphopantetheinyl transferase is from a thermophilic organism. In some embodiments, the parental antibody is an IgG, IgM, IgE, or IgA antibody. In a specific embodiment, the parental antibody is an IgG1 antibody. In some embodiments, the parental antibody is an IgG2, IgG3, or IgG4 antibody.

[0495] As used herein, “retains” activity means the enzyme being described maintains at least about 10% of the activity of the reference material, which is the B. subtilis Sfp 4′-phosphopantetheinyl transferase (see, e.g., Quadri et al., Biochemistry 37: 1585-1595 (1998)). For example, a different 4′-phosphopantetheinyl transferase or a mutant form of the enzyme retains at least about 10% of the 4′-phosphopantetheinyl transferase activity compared to Sfp under identical reaction conditions, i.e., using the same CoA substrate, the same peptide-tagged antibody, identical buffer conditions, identical substrate and enzyme concentrations, the same temperature, and the same reaction duration.

[0496] In one aspect, the present invention provides immunoconjugates comprising a modified antibody or fragment thereof, and a terminal group, wherein said modified antibody or fragment thereof comprises a peptide tag that by itself is a substrate of a 4′-phosphopantetheinyl transferase, and wherein said peptide tag is inserted between positions 2 and 3 of the V_{H} domain, positions 63 and 64 of the V_{H} domain, positions 64 and 65 of the V_{H} domain, positions 138 and 139 of the CH1 domain, positions 197 and 198 of the CH1 domain, positions 359 and 360 of the CH3 domain, positions 388 and 389 of the CH3 domain, the C-terminus of the CH3 domain (after Lys447), and/or positions 2 and 3 of the V_{L} domain of a parental antibody or fragment thereof. In another aspect, the present invention provides immunoconjugates comprising a modified antibody or fragment thereof, and a terminal group, wherein said modified antibody or fragment thereof comprises a peptide tag that by itself is a substrate of a 4′-phosphopantetheinyl transferase, and wherein the peptide tag is inserted between amino acid residues 2 and 3 of the VH or VL domain, or between amino acid residue 110 and 111 of the light chain, or between 119 and 120, or between 120 and 121, or between 135 and 136, or between 136 and 137, or between 138 and 139, or between 164 and 165, or between 165 and 166, or between 194 and 195 of the CH1 domain, or between 388 and 389, or between 445 and 446, or between 446 and 447 of the CH3 domain of a parental antibody or fragment thereof. In some embodiments, the peptide tag is inserted between amino acid residue 110 and 111 of the light chain, or between 119 and 120, or between 120 and 121, or between 135 and 136, or between 136 and 137, or between 138 and 139, or between 165 and 166 of the CH1 domain, or between 388 and 389 of the CH3 domain of a parental antibody or fragment thereof,

[0497] In one aspect, the invention provides immunoconjugates comprising a modified antibody or fragment thereof, and a terminal group, wherein said modified antibody or fragment thereof comprises SEQ ID NO: 103, SEQ ID NO: 109, SEQ ID NO:113, SEQ ID NO:121, SEQ ID NO:122, SEQ ID NO:127, SEQ ID NO:129, SEQ ID NO:130, SEQ ID NO:131, and/or SEQ ID NO:141. In another aspect, the invention provides immunoconjugates comprising a modified antibody or fragment thereof, and a terminal group, wherein said modified antibody or antibody fragment comprises comprises SEQ ID NO:26, SEQ ID NO:27, SEQ ID NO:32, SEQ ID NO:63, SEQ ID NO:94, SEQ ID NO:95, SEQ ID NO:96, SEQ ID NO:126, SEQ ID NO:127, SEQ ID NO:129, SEQ ID NO:130, SEQ ID NO:131, SEQ ID NO:132, SEQ ID NO:139, SEQ ID NO:149, SEQ ID NO:151, SEQ ID NO:152, SEQ ID NO:157, SEQ ID NO:158, SEQ ID NO:160, SEQ ID NO:168, SEQ ID NO:169, SEQ ID NO:178, SEQ ID NO:248, SEQ ID NO:250, SEQ ID NO:251, SEQ ID NO:256, SEQ ID NO:257, SEQ ID NO:259, SEQ ID NO:267, SEQ ID NO:268, SEQ ID NO:277, SEQ ID NO:348, SEQ ID NO:349, SEQ ID NO:356, SEQ ID NO:358, SEQ ID NO:359, SEQ ID NO:364, SEQ ID NO:365, SEQ ID NO:367, SEQ ID NO:373, SEQ ID NO:374, SEQ ID NO:380, SEQ ID NO:384, SEQ ID NO:386, SEQ ID NO:387, or SEQ ID NO:388. In some embodiments, the modified antibody or antibody fragment comprises SEQ ID NO:32, SEQ ID NO:63, SEQ ID NO:127, SEQ ID NO:129, SEQ ID NO:132, SEQ ID NO:151, SEQ ID NO:152, SEQ ID NO:157, SEQ ID NO:158, SEQ ID NO:160, SEQ ID NO:169, SEQ ID NO:250, SEQ ID NO:251, SEQ ID NO:256, SEQ ID NO:257, SEQ ID NO:259, SEQ ID NO:268, SEQ ID NO:358, SEQ ID NO:359, SEQ ID NO:364, SEQ ID NO:365, SEQ ID NO:367, SEQ ID NO:374, or SEQ ID NO:384.

[0498] With respect to the immunoconjugates described herein, in one aspect, said peptide tag is one or more peptides selected from those described in Table 2. The modified antibody heavy chain and/or light chain (or fragment thereof) may contain 1, 2, 3, 4, 5, 6, 7, 8, or more protein tags in its structural loops. In one embodiment, the modified antibodies or antibody fragments contain 2, 4, 6, 8, or more protein tags in its structural loops. In another embodiment, said 4′-phosphopantetheinyl transferase is Sfp, AcpS, T. maritima PPTase, human PPTase, or a mutant form thereof that retains the 4′-phosphopantetheinyl transferase activity. In one embodiment, said 4′-phosphopantetheinyl transferase originates from Homo sapiens, Bacillus subtilis, Escherichia coli, Thermotoga maritima, Clostridium thermocellum, as well as any other mammalian, bacterial or fungal genome. In a specific embodiment, said 4′-phosphopantetheinyl transferase is Sfp and the peptide tag is selected from GDSLSWLLRLLN (SEQ ID NO:1), GDSLSWL (SEQ ID NO:2), DSLEFIASKLA (SEQ ID NO:9), GDSLDMLEWSLM (SEQ ID NO:10), DSLEFIASKL (SEQ ID NO:18), and DSLEFIASK (SEQ ID NO:19). In one embodiment, the parental antibody is an IgG, IgM, IgE, or IgA antibody. In a specific embodiment, the parental antibody is an IgG1 antibody. In another specific embodiment, the parental antibody is an IgG2, IgG3, or IgG4 antibody.

[0499] In another aspect, the present invention provides immunoconjugates comprising a modified antibody or fragment thereof, and a terminal group, wherein said modified antibody or fragment thereof comprises a peptide tag that by itself is a substrate of a 4′-phosphopantetheinyl transferase, and wherein said peptide tag is grafted into a structural loop, or C- or N-terminus of the antibody or fragment thereof. In a specific embodiment, said peptide tag is grafted at amino acid positions from 62 to 64 of the V_{H} domain (mutations at amino acids 62 and 63, and insertion of the rest of the peptide tag between amino acids 63 and 64), at amino acid positions from 62 to 65 of the V_{H} domain (mutations at amino acids 62-64, and insertion of the rest of the peptide tag between amino acids 64 and 65); at amino acid positions from 133 to 139 of the CH1 domain (mutations of amino acids 133-138, and insertion of the rest of the peptide tag between amino acids 138-139), amino acid positions from 189 to 195 of the CH1 domain, and/or amino acid positions from 190 to 198 of the CH1 domain (mutations from amino acids 190-197, and insertion of the rest of the peptide tag between 197 and 198) of a parental antibody or fragment thereof. In one embodiment, said peptide tag is one or more peptides selected from those described in Table 2. The modified antibody heavy chain and/or light chain (or fragment thereof) may contain 1, 2, 3, 4, 5, 6, 7, 8, or more protein tags in its structural loops. In one embodiment, the modified antibodies or antibody fragments contain 2, 4, 6, 8, or more protein tags in its structural loops. In another embodiment, said 4′-phosphopantetheinyl transferase is Sfp, AcpS, T. maritima PPTase, human PPTase, or a mutant form thereof that retains the 4′-phosphopantetheinyl transferase activity. In one embodiment, said 4′-phosphopantetheinyl transferase originates from Homo sapiens, Bacillus subtilis, Escherichia coli, Thermotoga maritima, Clostridium thermocellum, as well as any other mammalian, bacterial or fungal genome. In a specific embodiment, said 4′-phosphopantetheinyl transferase is Sfp and the peptide tag is selected from GDSLSWLLRLLN (SEQ ID NO:1), GDSLSWL (SEQ ID NO:2), DSLEFIASKLA (SEQ ID NO:9), GDSLDMLEWSLM (SEQ ID NO:10), DSLEFIASKL (SEQ ID NO:18), and DSLEFIASK (SEQ ID NO:19). In one embodiment, the parental antibody is an IgG, IgM, IgE, or IgA antibody. In a specific embodiment, the parental antibody is an IgG1 antibody. In another specific embodiment, the parental antibody is an IgG2, IgG3, or IgG4 antibody.

[0500] In another aspect, the present invention provides modified antibodies or fragments thereof comprising a peptide tag that is a substrate of a 4′-phosphopantetheinyl transferase, and wherein said peptide tag is inserted between positions 2 and 3 of the V_{H} domain, positions 63 and 64 of the V_{H} domain, positions 64 and 65 of the V_{H} domain, positions 138 and 139 of the CH1 domain, positions 197 and 198 of the CH1 domain, positions 359 and 360 of the CH3 domain, positions 388 and 389 of the CH3 domain, the C-terminus of the CH3 domain (after Lys447), and/or positions 2 and 3 of the V_{L} domain of a parental antibody or fragment thereof. In another aspect, the peptide tag is inserted between amino acid residues 2 and 3 of the VH or VL domain, or between amino acid residue 110 and 111 of the light chain, or between 119 and 120, or between 120 and 121, or between 135 and 136, or between 136 and 137, or between 138 and 139, or between 164 and 165, or between 165 and 166, or between 194 and 195 of the CH1 domain, or between 388 and 389, or between 445 and 446, or between 446 and 447 of the CH3 domain of a parental antibody or fragment thereof. In some embodiments, the peptide tag is inserted between amino acid residue 110 and 111 of the light chain, or between 119 and 120, or between 120 and 121, or between 135 and 136, or between 136 and 137, or between 138 and 139, or between 165 and 166 of the CH1 domain, or between 388 and 389 of the CH3 domain of a parental antibody or fragment thereof.

[0501] In another aspect, the present invention provides a modified antibody or fragment thereof comprising SEQ ID NO: 103, SEQ ID NO: 109, SEQ ID NO:113, SEQ ID NO:121, SEQ ID NO:122, SEQ ID NO:127, SEQ ID NO:129, SEQ ID NO:130, SEQ ID NO:131, and/or SEQ ID NO:141. In another aspect, the present invention provides a modified antibody or fragment thereof comprising SEQ ID NO:26, SEQ ID NO:27, SEQ ID NO:32, SEQ ID NO:63, SEQ ID NO:94, SEQ ID NO:95, SEQ ID NO:96, SEQ ID NO:126, SEQ ID NO:127, SEQ ID NO:129, SEQ ID NO:130, SEQ ID NO:131, SEQ ID NO:132, SEQ ID NO:139, SEQ ID NO:149, SEQ ID NO:151, SEQ ID NO:152, SEQ ID NO:157, SEQ ID NO:158, SEQ ID NO:160, SEQ ID NO:168, SEQ ID NO:169, SEQ ID NO:178, SEQ ID NO:248, SEQ ID NO:250, SEQ ID NO:251, SEQ ID NO:256, SEQ ID NO:257, SEQ ID NO:259, SEQ ID NO:267, SEQ ID NO:268, SEQ ID NO:277, SEQ ID NO:348, SEQ ID NO:349, SEQ ID NO:356, SEQ ID NO:358, SEQ ID NO:359, SEQ ID NO:364, SEQ ID NO:365, SEQ ID NO:367, SEQ ID NO:373, SEQ ID NO:374, SEQ ID NO:380, SEQ ID NO:384, SEQ ID NO:386, SEQ ID NO:387, or SEQ ID NO:388. In some embodiments, the present invention provides a modified antibody or fragment thereof comprising SEQ ID NO:32, SEQ ID NO:63, SEQ ID NO:127, SEQ ID NO:129, SEQ ID NO:132, SEQ ID NO:151, SEQ ID NO:152, SEQ ID NO:157, SEQ ID NO:158, SEQ ID NO:160, SEQ ID NO:169, SEQ ID NO:250, SEQ ID NO:251, SEQ ID NO:256, SEQ ID NO:257, SEQ ID NO:259, SEQ ID NO:268, SEQ ID NO:358, SEQ ID NO:359, SEQ ID NO:364, SEQ ID NO:365, SEQ ID NO:367, SEQ ID NO:374, or SEQ ID NO:384.

[0502] In one aspect, said peptide tag is one or more peptides selected from those described in Table 2. The antibody heavy chain and/or light chain (or fragment thereof) may contain 1, 2, 3, 4, 5, 6, 7, 8, or more protein tags in its structural loops. In some embodiments, the antibodies or antibody fragments contain 2, 4, 6, 8, or more protein tags in its structural loops. In some embodiments, said 4′-phosphopantetheinyl transferase is Sfp, AcpS, T. maritima PPTase, human PPTase, or a mutant form thereof that retains the 4′-phosphopantetheinyl transferase activity. In some embodiments, said 4′-phosphopantetheinyl transferase originates from Homo sapiens, Bacillus subtilis, Escherichia coli, Thermotoga maritima, Clostridium thermocellum, as well as any other mammalian, bacterial or fungal genome. In a specific embodiment, said 4′-phosphopantetheinyl transferase is Sfp and the peptide tag is selected from GDSLSWLLRLLN (SEQ ID NO:1), GDSLSWL (SEQ ID NO:2), DSLEFIASKLA (SEQ ID NO:9), GDSLDMLEWSLM (SEQ ID NO:10), DSLEFIASKL (SEQ ID NO:18), and DSLEFIASK (SEQ ID NO:19). In some embodiments, the parental antibody is an IgG, IgM, IgE, or IgA antibody. In a specific embodiment, the parental antibody is an IgG1 antibody. In some embodiments, the parental antibody is an IgG2, IgG3, or IgG4 antibody.

[0503] In another aspect, the present invention provides modified antibodies or fragments thereof comprising a peptide tag that is a substrate of a 4′-phosphopantetheinyl transferase, and wherein said peptide tag is grafted into a structural loop, or C- or N-terminus of the antibody or fragment thereof. In some embodiments, said peptide tag is grafted at amino acid positions from 62 to 64 of the V_{H} domain (mutations at amino acids 62 and 63, and insertion of the rest of the peptide tag between amino acids 63 and 64), at amino acid positions from 62 to 65 of the V_{H} domain (mutations at amino acids 62-64, and insertion of the rest of the peptide tag between amino acids 64 and 65); at amino acid positions from 133 to 139 of the CH1 domain (mutations of amino acids 133-138, and insertion of the rest of the peptide tag between amino acids 138-139), amino acid positions from 189 to 195 of the CH1 domain, and/or amino acid positions from 190 to 198 of the CH1 domain (mutations from amino acids 190-197, and insertion of the rest of the peptide tag between 197 and 198) of a parental antibody or fragment thereof. In one embodiment, said peptide tag is one or more peptides selected from those described in Table 2. The modified antibody heavy chain and/or light chain (or fragment thereof) may contain 1, 2, 3, 4, 5, 6, 7, 8, or more protein tags in its structural loops. In one embodiment, the modified antibodies or antibody fragments contain 2, 4, 6, 8, or more protein tags in its structural loops. In another embodiment, said 4′-phosphopantetheinyl transferase is Sfp, AcpS, T. maritima PPTase, human PPTase, or a mutant form thereof that retains the 4′-phosphopantetheinyl transferase activity. In one embodiment, said 4′-phosphopantetheinyl transferase originates from Homo sapiens, Bacillus subtilis, Escherichia coli, Thermotoga maritima, Clostridium thermocellum, as well as any other mammalian, bacterial or fungal genome. In some embodiments, said 4′-phosphopantetheinyl transferase is Sfp and the peptide tag is selected from GDSLSWLLRLLN (SEQ ID NO:1), GDSLSWL (SEQ ID NO:2), DSLEFIASKLA (SEQ ID NO:9), GDSLDMLEWSLM (SEQ ID NO:10), DSLEFIASKL (SEQ ID NO:18), and DSLEFIASK (SEQ ID NO:19). In one embodiment, the parental antibody is an IgG, IgM, IgE, or IgA antibody. In a specific embodiment, the parental antibody is an IgG1 antibody. In some embodiments, the parental antibody is an IgG2, IgG3, or IgG4 antibody.

[0504] In certain aspects, the modified antibodies provided herein are engineered to contain one or more orthogonal conjugation sites. Such orthogonal conjugation sites include, but are not limited to, a substrate of Sfp 4′-phosphopantetheinyl transferase, a substrate of AcpS 4′-phosphopantetheinyl transferase, T. maritima 4′-phosphopantetheinyl transferase, human 4′-phosphopantetheinyl transferase, a lysine, a cysteine, a tyrosine, a histidine, an unnatural amino acid, pyrrolysine and pyrroline-carboxy-lysine. The orthogonal conjugation sites may also be peptide sequences that can be enzymatically or chemically modified, e.g., a tetracysteine tag, a LPXTG-sortase peptide (SEQ ID NO:1057) (X is any amino acid), a biotin acceptor peptide, a CXPXR-aldehyde tag (SEQ ID NO:1058) (X is any amino acid), or a His tag. In certain embodiments, such engineered antibodies are labeled using the methods of the invention in combination with other conjugation methods known in the art including, but not limited to, chemoselective conjugation through cysteine, lysine, histidine, tyrosine, formyl-glycine, pyrrolysine, pyrroline-carboxylysine and unnatural amino acids.

[0505] In certain aspects, the enzymes Sfp and AcpS are used for orthogonal site-specific labeling of the same or two different labels onto an antibody engineered to contain an S-series peptide (for example, S1, S2, S3, S4, S5, S6 and S7) and an A-series peptide (for example, A1, A-1, A-2, A-3, A-4 and A-6) located in the VH, VL, CH1, CH2, CH3, or C_{L} region of the antibody (see also Table 2).

[0506] In other aspects, the enzymes Sfp and AcpS are used for orthogonal site-specific labeling of two different labels onto an antibody engineered to contain an ybbR-series peptide (for example, ybbR11, ybbR12 and ybbR13) and an A-series peptide (for example, A1, A-1, A-2, A-3, A-4 and A-6) located in the CH1, CH2, CH3, or C_{L} region of the antibody.

[0507] In other aspects, the enzymes Sfp or AcpS are used for orthogonal site-specific labeling onto an antibody engineered to contain an ybbR-series peptide (for example, ybbR11, ybbR12 and ybbR13) and an A-series peptide (for example, A1, A-1, A-2, A-3, A-4 and A-6) located in the VH, VL, CH1, CH2, CH3, or C_{L} region of the antibody in combination with other conjugation methods. Such methods include but are not limited to conjugation to lysine, cysteine, tyrosine, histidine, formyl glycine, unnatural amino acids, pyrrolysine and/or pyrroline-carboxy-lysine. Such methods can be used to attached the same or different labels than used for the enzymatic conjugation through Sfp or AcpS.

[0508] Proteins Having 4′-Phosphopantetheinyl Transferase Activity and Peptide Substrates

[0509] As used herein, the terms “4′-phosphopantetheinyl transferase” (PPTases) and “protein having 4′-phosphopantetheinyl transferase activity” are used interchangeably and refer to any protein or a fragment thereof, which is capable of transferring a ppan group from a donor molecule, such as coenzyme A (CoA) or an analogue thereof, to a substrate, such as a peptide tag or an acyl carrier protein.

[0510] PPTases are enzymes which catalyze post-translational modification of carrier proteins associated with fatty acid synthases (FASs), polyketide synthases (PKSs) and nonribosomal peptide synthetases (NRPSs). These carrier proteins are commonly referred to as ACP, acyl carrier proteins (FASs and PKSs) or to as PCP, peptidyl carrier proteins (NRPSs). ACPs and PCPs consist of about 80 amino acids and are usually integrated as domains in FAS, PKS, or NRPS multienzyme complexes. In some instances, ACPs and PCPs are also found as free-standing autonomously folded proteins. The ACP is essential for fatty acid and polyketide biosynthesis, because it carries the corresponding metabolic intermediates via covalent attachment to its flexible ppan prosthetic group. The PCP carries out the analogous function in nonribosomal peptide synthesis by transporting peptide intermediates between active sites in NRPS multienzyme complexes. PPTases have been classified into three groups, based on sequence and structural similarity and substrate specificity. Members of the first group of PPTases, for example, AcpS of Escherichia coli, are about 120 amino acid residues long, function as homotrimers, and have fairly narrow substrate specificities limited to, for example, to the acyl carrier proteins (ACPs) of type II FAS and PKS systems. Members of the second group, exemplified by Sfp of Bacillus subtilis or the human PPTase, function as monomers, and have been reported to have broad substrate specificities that include carrier proteins associated with NRPs, FASs and PKSs. (see, e.g., Suo et al., Proc. Natl. Acad. Sci. USA3 98:99-104, 2001; Quadri et al., Biochem., 37:1585-95, 1998; Liu et al., Arch. Microbiol, 183:37-44, 2005; Joshi et al., J. Biol. Chem., 278:33142-33149, 2003). The third group includes PPTases that are attached covalently to the type I FASs, such as those associated with the yeast cytosolic FAS. (see, e.g., Fichtlscherer et al., Eur. J. Biochem., 267:2666-71, 2000).

[0511] According to the present invention, PPTases include naturally occurring proteins having 4′-phosphopantetheinyl transferase activity, including but not limited to, AcpS from E. coli (type I PPTase) and Sfp from B. subtilis (type II PPTase), integrated PPTase domains (type III PPTase) associated with fatty acid synthases (FAS) from S. cerevisiae, S. pombe, C. albacans, E. nidulans, and P. patulum, EntD from E. coli, S. flexneri, S. typhimurium and S. austin, Psf-1 from B. pumilus, Gsp from B. brevis, Hetl from Anabaena sp., Lys5 from S. cerevisiae, Lpa-14 from B. subtilis and 0195 from E. coli, PPTase (NP_{—}228501) of T. maritima MSB8, PPTase (NP_{—}056238) of Homo sapiens, and homologs and mutants thereof. PPTases of the present invention also include proteins having 4′-phosphopantetheinyl transferase activity from species other than the ones described above, as well as those artificially or recombinantly produced proteins, which are capable of 4′-phosphopantetheinylating a peptide moiety described herein.

[0512] Sfp and AcpS represent two classes of 4′-phosphopantetheinyl transferases that show differences both in their substrate specificity for the carrier protein domains and in their structures (Flugal et al., J. Biol. Chem., 275:959-968, 2000; Lambalot et al., Chem. Biol., 3:923-936, 1996). The Sfp class of pseudodimeric PPTases are about 230 residues in size and the crystal structure of Sfp suggests it has a twofold symmetry with the N— and the C-terminal halves of the molecule adopting similar folds, with the active site of the enzyme at the interface (Hodneland et al., Proc. Natl. Acad. Sci. USA, 99:5048-5052, 2002; Koglin et al., Science, 312:273-276, 2006). In contrast, AcpS is about 120 residues in length, about half the size of Sfp, and the crystal structures of AcpS show that the enzyme assembles into trimers and the ACP and CoA binding sites are formed at the interface between each monomer (Reuter et al., Embo. J., 18:6823-6831, 1999; Chirgadze et al., Embo. J., 19:5281-5287, 2000). It has been reported that Sfp exhibits a much broader substrate specificity than AcpS in that Sfp can modify both PCP and ACP domains from nonribosomal peptides synthetases, polyketide synthases, and fatty acid synthases, while AcpS modifies only ACP (Flugel et al., J. Biol. Chem., 275:959-968, 2000; Parris et al., Structure, 8:883-895, 2000; Mofid et al., J. Biol. Chem., 277:17023-17031, 2002).

[0513] ACP and PCP substrates of both kinds of PPTases adopt similar folds as four-helix bundle proteins with the serine residue to be modified by the ppan prosthetic group at the top of the second alpha-helix, which has been shown to play an important role for interacting with Sfp and AcpS (Hodneland et al., Proc. Natl. Acad. Sci. USA, 99:5048-5052, 2002; Chirgadze et al., Embo. J., 19:5281-5287, 2000; Quadri et al., Biochem., 37:1585-1595, 1998; L₁ et al., Biochem., 42:4648-4657, 2003). Although there is not an obvious consensus sequence difference between PCPs and ACPs, the most significant difference between the two is the electrostatic surface potential of the carrier proteins, with a neutral protein surface for PCPs and a negatively charged acidic surface for ACP domains in FAS and PKS systems (Parris et al., Structure, 8:883-895, 2000).

[0514] Groups of short peptides have been identified as efficient substrates for PPTases. For example, ybbR13 is an 11 amino acid residue peptide, which is a substrate of Sfp (J. Yin et al., Proc. Natl. Acad. Sci. USA, 102:15815-15820, 2005; Z. Zhou et al., ACS Chem. Biol., 2:337-346, 2007; Z. Zhou et al., J. Am. Chem. Soc., 130: 9925-9930, 2008). The ybbR13 peptide (DSLEFIASKLA (SEQ ID NO:9)) was isolated from a phage displayed library of the B. subtilis genome (J. Yin et al., Proc. Natl. Acad. Sci. USA, 102:15815-15820, 2005). A part of the sequence of the ybbR13 peptide is derived from a B. subtilis open reading frame, called ybbR, and it includes the (H/D)S(L/I) tri-peptide sequence at the N-terminus, which is conserved in known substrates of PPTases such as ACPs, PCPs, and aryl carrier proteins (ArCPs). The ybbR peptide does not include the amino acid sequence, DxFFxxLGG (SEQ ID NO:1059) at its N-terminus, which is found to be conserved in PCPs. Modifications and variants of the ybbR13 peptide have been described which can be used as substrates in 4′-phosphopantetheinylation reactions for site specific labeling (J. Yin et al., Proc. Natl. Acad. Sci. USA, 102:15815-15820, 2005). Additional peptide substrates for PPTases are the S series of peptides and the A series of peptides, designated as “S” or “A” based on their reactivity with Sfp or AcpS, respectively (Z. Zhou et al. ACS Chem Biol., 2:337-346, 2007 and Z. Zhou et al. J. Am. Chem. Soc., 130:9925-9930, 2008). Exemplary S series of peptides include, but are not limited to, S6, which is an efficient substrate for Sfp, and exemplary A series of peptides include, but are not limited to, A1, which is an efficient substrate for AcpS. Both S6 and A1 peptides are 12 amino acid residues in length.

[0515] Examples of peptide substrates are listed in Table 2 below. According to the present invention, these short peptide tags can be used for the site-specific labeling of target proteins (including antibodies) in reactions catalyzed by PPTases. Additionally, a pairing of peptide tags and respective PPTases described herein, e.g., ybbR13/Sfp or S6/Sfp and A1/AcpS, can also be used for orthogonal site-specific labeling of one (or multiple) target proteins, e.g., in cell lysates or on the surface of live cells.

TABLE 2
PPTase peptide substrate examples.

| Sequence | SEQ ID NO: | Name |
|---|---|---|
| GDSLSWLLRLLN | 1 | S6 |
| GDSLSWL | 2 | S6 truncate |
| GDSLSWLVRCLN | 3 | S1 |
| GDSLSWLLRCLN | 4 | S2 |
| GDSLSWLVRLLN | 5 | S3 |
| GDSLSWLLRSLN | 6 | S7 |
| GSQDVLDSLEFIASKLA | 7 | Ybbr11 |
| VLDSLEFIASKLA | 8 | Ybbr12 |
| DSLEFIASKLA | 9 | Ybbr13 |
| GDSLDMLEWSLM | 10 | A1 |
| GDSLDMLEWSL | 11 | A-1 |
| GDSLDMLEWS | 12 | A-2 |
| GDSLDMLEW | 13 | A-3 |
| DSLDMLEW | 14 | A-4 |
| GDSLDM | 15 | A-6 |
| LDSVRMMALAAR | 16 | E0 |
| LDSLDMLEWSLR | 17 | E2 |
| DSLEFIASKL | 18 | ybbR truncate 1 |
| DSLEFIASK | 19 | ybbR truncate 2 |
| DVLDSLEFI | 20 | ybbR8 |
| VLDSLEFIAS | 21 | ybbR14 |
| DSLDMLEWSL | 1132 | A1 truncate |

The modified serine residue is underlined.

[0516] Accordingly, the present invention provides engineered antibodies which contain one or more of the peptide tags listed in Table 2, and methods of labeling such antibodies, e.g., conjugating with a cytotoxin. The labeling chemistry is illustrated below and in the Examples.

### 2. Labeling Chemistry

[0517] The modified antibody or fragment thereof provided herein are site-specifically labeled by post-translational modification of the short peptide tag (inserted or grafted or combination thereof) using PPTases or mutants thereof, including, but not limited to, Sfp, AcpS, human PPTase or T. maritima PPTase. Such post-translational modifications involve a PPTase catalyzed reaction between a conserved serine residue in the short peptide tag and a 4′-phosphopantetheinyl (ppan) group of coenzyme A (CoA) or a coenzyme A analogue. In this reaction, the ppan prosthetic group of CoA, or modified ppan prosthetic group of the CoA analogue, is attached to the short peptide tag through the formation of a phosphodiester bond with the hydroxyl group of the conserved serine residue of the short peptide tag which has been incorporated (i.e. inserted or grafted or combination thereof) into the antibody. The ppan or modified ppan is linked to a terminal group (TG) and the formation of the phosphodiester bond thereby conjugates the terminal group (TG) to the modified antibody or fragment thereof via a linker which includes the ppan or modified ppan moiety.

[0518] In certain embodiments the modified antibodies or fragment thereof provided herein are labeled by a one-step method wherein the post-translational modification occurs by reacting a CoA linked to a terminal group (TG), or a CoA analogue linked to a terminal group (TG), with the conserved serine of the short peptide tag engineered into the antibody, as shown in Schemes (Ia)-(Ic) below. Alternatively, in other embodiments of the post-translational modification of the modified antibodies or fragment thereof provided herein, the modified antibodies or fragment thereof are labeled by a two-step method wherein the post-translational modification involves first reacting an activated CoA or an activated CoA analogue with the conserved serine of the short peptide tag engineered into the antibody, followed by reacting a functionalized terminal group (TG) with the reactive group on the activated CoA or an activated CoA. Such two-step methods are illustrated in Schemes (IIa)-(IIf) below. In other embodiments of the post-translational modification of the modified antibodies or fragment thereof provided herein, the modified antibodies or fragment thereof are labeled by a three-step method, wherein the post-translational modification involves first reacting a CoA having a protected ppan prosthetic group, or a CoA analogue having protected ppan prosthetic group, with the conserved serine of the short peptide tag engineered into the antibody, thereby attaching the CoA or CoA analogue to the antibody. In the second step the protected ppan prosthetic group is deprotected thereby generating a reactive functional group on the protected ppan prosthetic group. In the third step, this reactive functional group is linked to a terminal group (TG), thereby attaching the terminal group to the modified antibody or fragment thereof. Such three-step methods are illustrated in Schemes (IIIa)-(IIIf) below

### One-Step Method

[0519] The One-step method used to label the modified antibodies or fragment thereof provided herein is shown in Scheme (Ia):

[chemical structure]

[0520] where:

### R₂ is H or P(═O)(OH)₂;

[0521] Linker Unit (LU) is a chemical moiety that links the terminal group (TG) to the modified ppan prosthetic group of the CoA analogue and
[0522] terminal group (TG) is a drug moiety selected from an anti-cancer agent, an anti-inflammatory agent, an antifungal agent, an antibacterial agent, an anti-parasitic agent, an anti-viral agent, and an anesthetic agent, a biophysical probe, a fluorophore, an affinity probe, a chelator, a spectroscopic probe, a radioactive probe, a lipid molecule, a polyethylene glycol, a polymer, a spin label, DNA, RNA, a protein, a peptide, an antibody, an antibody fragment, a nanoparticle, a quantum dot, a liposome, a PLGA particle, a polysaccharide, or a surface.
[0523] In certain embodiments the Linker Unit (LU) comprises a linker selected from a non-enzymatically cleavable linker, a non-cleavable linker, an enzymatically cleavable linker, a photo stable linker, a photo-cleavable linker or any combination thereof, and the Linker Unit (LU) optionally contains a self-immolative spacer.
[0524] In certain embodiments the Linker Unit (LU) is -L₁-L₂-L₃-L₄-, wherein
[0525] L₁ is a bond, a non-enzymatically cleavable linker, a non-cleavable linker, an enzymatically cleavable linker, a photo stable linker or a photo-cleavable linker;
[0526] L₂ is a bond, a non-enzymatically cleavable linker, a non-cleavable linker, an enzymatically cleavable linker, a photo stable linker or a photo-cleavable linker;
[0527] L₃ is a bond, a non-enzymatically cleavable linker, a non-cleavable linker, an enzymatically cleavable linker, a photo stable linker or a photo-cleavable linker, and
[0528] L₄ is a bond, a non-enzymatically cleavable linker, a non-cleavable linker, an enzymatically cleavable linker, a photo stable linker, a photo-cleavable linker or a self-immolative spacer.
   In certain embodiments the Linker Unit (LU) is -L₁-L₂-L₃-L₄-, wherein
[0529] L₁ is a non-enzymatically cleavable linker, a non-cleavable linker, an enzymatically cleavable linker, a photo stable linker or a photo-cleavable linker;
[0530] L₂ is a bond, a non-enzymatically cleavable linker, a non-cleavable linker, an enzymatically cleavable linker, a photo stable linker or a photo-cleavable linker;
[0531] L₃ is a bond, a non-enzymatically cleavable linker, a non-cleavable linker, an enzymatically cleavable linker, a photo stable linker or a photo-cleavable linker, and
[0532] L₄ is a bond, a non-enzymatically cleavable linker, a non-cleavable linker, an enzymatically cleavable linker, a photo stable linker, a photo-cleavable linker or a self-immolative spacer.
   In certain embodiments the Linker Unit (LU) is -L₁-L₂-L₃-L₄-, wherein
[0533] L₁ is a bond, -A₁-, -A₁X²— or —X²—; where:
   [0534] A₁ is —C(═O)NH—, —C(═O)NH(CH₂)ₙ—, —C(═O)NH(C(R⁴)₂)ₙ—, —(O(CH₂)ₙ)ₘ—, —(O(C(R⁴)₂)ₙ)ₘ—, —((CH₂)ₙO)ₘ—, —(((C(R⁴)₂)ₙO)ₘ—, —((CH₂)ₙO)ₘ(CH₂)ₙ—, —(((C(R⁴)₂)ₙO)ₘC(R⁴)₂)ₙ—, —(CH₂)ₙC(═O)NH—, —(C(R⁴)₂)ₙC(═O)NH—, —(CH₂)ₙNHC(═O)—, —(C(R⁴)₂)ₙNHC(═O)—, —NHC(═O)(CH₂)ₙ—, —NHC(═O)(C(R⁴)₂)ₙ—, —C(═O)NH(CH₂)ₙS—, —C(═O)NH(C(R⁴)₂)ₙS—, —S(CH₂)ₙC(═O)NH—, —S(C(R⁴)₂)ₙC(═O)NH—, —C(═O)NH(CH₂)ₙNHC(═O)(CH₂)ₙ—, —C(═O)NH(C(R⁴)₂)ₙNHC(═O)(C(R⁴)₂)ₙ—, —C(═O)(CH₂)ₙ—, —C(═O)(C(R⁴)₂)ₙ—, —(CH₂)ₙC(═O)—, —(C(R⁴)₂)ₙC(═O)—, —(CH₂)ₙ(O(CH₂)ₙ)ₘNHC(═O)(CH₂)ₙ—, —(C(R⁴)₂)ₙ(O(C(R⁴)₂)ₙ)ₘNHC(═O)(C(R⁴)₂)ₙ—, —(CH₂)ₙNHC(═O)(CH₂)ₙ—, —(C(R⁴)₂)ₙNHC(═O)(C(R⁴)₂)ₙ—, —(CH₂)ₙNH((CH₂)ₙO)ₘ(CH₂)ₙ—, —(C(R⁴)₂)ₙNH((C(R⁴)₂)ₙO)ₘ(C(R⁴)₂)ₙ—, —(O(CH₂)ₙ)ₘNHC(═O)(CH₂)ₙ—, or —(O(C(R⁴)₂)ₙ)ₘNHC(═O)(C(R⁴)₂)ₙ—;
   [0535] each X² is independently selected from a bond,

[chemical structure]

[chemical structure]

[chemical structure]

—S—, —Si(OH)₂O—,

[chemical structure]

CHR⁴(CH₂)ₙC(═O)NH—, —CHR⁴(CH₂)ₙNHC(═O)—, —C(═O)NH— and —NHC(═O)—;
[0536] each R⁴ is independently selected from H, C₁₋₄alkyl, —C(═O)OH and —OH,
[0537] each R⁵ is independently selected from H, C₁₋₄alkyl, phenyl or C₁₋₄alkyl substituted with 1 to 3 —OH groups;
[0538] each R⁶ is independently selected from H, fluoro, benzyloxy substituted with —C(═O)OH, benzyl substituted with —C(═O)OH, C₁₋₄alkoxy substituted with —C(═O)OH and C₁₋₄alkyl substituted with —C(═O)OH;
[0539] R⁷ is independently selected from H, phenyl and pyridine;
[0540] R⁸ is independently selected from

[chemical structure]

[0541] R⁹ is independently selected from H and C₁₋₆haloalkyl;
[0542] each n is independently selected from 1, 2, 3, 4, 5, 6, 7, 8 and 9, and
[0543] each m is independently selected from 1, 2, 3, 4, 5, 6, 7, 8 and 9;
[0544] L₂ is a bond, a non-enzymatically cleavable linker, a non-cleavable linker, an enzymatically cleavable linker, a photo stable linker or a photo-cleavable linker;
[0545] L₃ is a bond, a non-enzymatically cleavable linker, a non-cleavable linker, an enzymatically cleavable linker, a photo stable linker or a photo-cleavable linker, and
[0546] L₄ is a bond, a non-enzymatically cleavable linker, a non-cleavable linker, an enzymatically cleavable linker, a photo stable linker, a photo-cleavable linker or a self-immolative spacer.
   In certain embodiments, L₁ is —C(═O)—CH₂CH₂—NH—C(═O)—CH₂CH₂—S—, so LU is —C(═O)—CH₂CH₂—NH—C(═O)—CH₂CH₂—S-L₂-L₃-L₄-.
   In certain embodiments the Linker Unit (LU) is -L₁-L₂-L₃-L₄-, wherein
[0547] L₁ is a bond, -A₁-, -A₁X²— or —X²—; where:
   [0548] A₁ is —C(═O)NH—, —C(═O)NH(CH₂)ₙ—, —(O(CH₂)ₙ)ₘ—, —((CH₂)ₙO)ₘ—, —((CH₂)ₙO)ₘ(CH₂)ₙ—, —(CH₂)ₙC(═O)NH—, —(CH₂)ₙNHC(═O)—, —NHC(═O)(CH₂)ₙ—, —C(═O)NH(CH₂)ₙS—, —S(CH₂)ₙC(═O)NH—, —C(═O)NH(CH₂)ₙNHC(═O)(CH₂)ₙ—, —C(═O)(CH₂)ₙ—, —(CH₂)ₙC(═O)—, —(CH₂)ₙ(O(CH₂)ₙ)ₘNHC(═O)(CH₂)ₙ—, —(CH₂)ₙNHC(═O)(CH₂)ₙ—, —(CH₂)ₙNH((CH₂)ₙO)ₘ(CH₂)ₙ—, or —(O(CH₂)ₙ)ₘNHC(═O)(CH₂)ₙ—;
   [0549] each X² is independently selected from a bond,

[chemical structure]

[chemical structure]

[chemical structure]

—S—, —Si(OH)₂O—,

[chemical structure]

CHR⁴(CH₂)ₙC(═O)NH—, —CHR⁴(CH₂)ₙNHC(═O)—, —C(═O)NH— and —NHC(═O)—;
[0550] each R⁴ is independently selected from H, C₁₋₄alkyl, —C(═O)OH and —OH,
[0551] each R⁵ is independently selected from H, C₁₋₄alkyl, phenyl or C₁₋₄alkyl substituted with 1 to 3 —OH groups;
[0552] each R⁶ is independently selected from H, fluoro, benzyloxy substituted with —C(═O)OH, benzyl substituted with —C(═O)OH, C₁₋₄alkoxy substituted with —C(═O)OH and C₁₋₄alkyl substituted with —C(═O)OH;
[0553] R⁷ is independently selected from H, phenyl and pyridine;
[0554] R⁸ is independently selected from

[chemical structure]

[0555] R⁹ is independently selected from H and C₁₋₆haloalkyl;
[0556] each n is independently selected from 1, 2, 3, 4, 5, 6, 7, 8 and 9, and
[0557] each m is independently selected from 1, 2, 3, 4, 5, 6, 7, 8 and 9;
[0558] L₂ is a bond, a non-enzymatically cleavable linker, a non-cleavable linker, an enzymatically cleavable linker, a photo stable linker or a photo-cleavable linker;
[0559] L₃ is a bond, a non-enzymatically cleavable linker, a non-cleavable linker, an enzymatically cleavable linker, a photo stable linker or a photo-cleavable linker;
[0560] L₄ is a bond, a non-enzymatically cleavable linker, a non-cleavable linker, an enzymatically cleavable linker, a photo stable linker, a photo-cleavable linker or a self-immolative spacer.
   In certain embodiments the Linker Unit (LU) is -L₁-L₂-L₃-L₄-, wherein
[0561] L₁ is a bond, -A₁-, -A₁X²— or —X²—; where:
   [0562] A₁ is —C(═O)NH—, —C(═O)NH(CH₂)ₙ—, —C(═O)NH(CH₂)ₙS—, —(O(CH₂)ₙ)ₘ—, —((CH₂)ₙO)ₘ(CH₂)ₙ—, —NHC(═O)(CH₂)ₙ—, —C(═O)NH(CH₂)ₙNHC(═O)(CH₂)ₙ—, —(CH₂)ₙNH((CH₂)ₙO)ₘ(CH₂)ₙ— or —(O(CH₂)ₙ)ₘNHC(═O)(CH₂)ₙ—;
   [0563] each X² is independently selected from a bond,

[chemical structure]

[chemical structure]

[chemical structure]

—S—, —Si(OH)₂O—,

[chemical structure]

CHR⁴(CH₂)ₙC(═O)NH—, —CHR⁴(CH₂)ₙNHC(═O)—, —C(═O)NH— and —NHC(═O)—;
[0564] each R⁴ is independently selected from H, C₁₋₄alkyl, —C(═O)OH and —OH,
[0565] each R⁵ is independently selected from H, C₁₋₄alkyl, phenyl or C₁₋₄alkyl substituted with 1 to 3 —OH groups;
[0566] each R⁶ is independently selected from H, fluoro, benzyloxy substituted with —C(═O)OH, benzyl substituted with —C(═O)OH, C₁₋₄alkoxy substituted with —C(═O)OH and C₁₋₄alkyl substituted with —C(═O)OH;
[0567] R⁷ is independently selected from H, phenyl and pyridine;
[0568] R⁸ is independently selected from

[chemical structure]

[0569] R⁹ is independently selected from H and C₁₋₆haloalkyl;
[0570] each n is independently selected from 1, 2, 3, 4, 5, 6, 7, 8 and 9, and
[0571] each m is independently selected from 1, 2, 3, 4, 5, 6, 7, 8 and 9;
[0572] L₂ is a bond, a non-enzymatically cleavable linker, a non-cleavable linker, an enzymatically cleavable linker, a photo stable linker or a photo-cleavable linker;
[0573] L₃ is a bond, a non-enzymatically cleavable linker, a non-cleavable linker, an enzymatically cleavable linker, a photo stable linker or a photo-cleavable linker, and
[0574] L₄ is a bond, a non-enzymatically cleavable linker, a non-cleavable linker, an enzymatically cleavable linker, a photo stable linker, a photo-cleavable linker or a self-immolative spacer.
   In certain embodiments the Linker Unit (LU) is -L₁-L₂-L₃-L₄-, wherein
[0575] L₁ is a bond, -A₁-, -A₁X²— or —X²—; where:
   [0576] A₁ is —C(═O)NH—, —C(═O)NH(CH₂)ₙ—, —C(═O)NH(CH₂)ₙS—, —(O(CH₂)ₙ)ₘ—, —((CH₂)ₙO)ₘ(CH₂)ₙ—, —NHC(═O)(CH₂)ₙ—, —C(═O)NH(CH₂)ₙNHC(═O)(CH₂)ₙ—, —(CH₂)ₙNH((CH₂)ₙO)ₘ(CH₂)ₙ— or —(O(CH₂)ₙ)ₘNHC(═O)(CH₂)ₙ—;
   [0577] each X² is independently selected from a bond,

[chemical structure]

[chemical structure]

[chemical structure]

—S—, —Si(OH)₂O—,

[chemical structure]

—CHR⁴(CH₂)ₙC(═O)NH—, —CHR⁴(CH₂)ₙNHC(═O)—, —C(═O)NH— and —NHC(═O)—;
[0578] each R⁴ is independently selected from H, C₁₋₄alkyl, —C(═O)OH and —OH,
[0579] each R⁵ is independently selected from H, C₁₋₄alkyl, phenyl or C₁₋₄alkyl substituted with 1 to 3 —OH groups;
[0580] each R⁶ is independently selected from H, fluoro, benzyloxy substituted with —C(═O)OH, benzyl substituted with —C(═O)OH, C₁₋₄alkoxy substituted with —C(═O)OH and C₁₋₄alkyl substituted with —C(═O)OH;
[0581] R⁷ is independently selected from H, phenyl and pyridine;
[0582] R⁸ is independently selected from

[chemical structure]

[0583] R⁹ is independently selected from H and C₁₋₆haloalkyl;
[0584] each n is independently selected from 1, 2, 3, 4, 5, 6, 7, 8 and 9, and
[0585] each m is independently selected from 1, 2, 3, 4, 5, 6, 7, 8 and 9;
[0586] L₂ is a bond, a non-enzymatically cleavable linker or a non-cleavable linker;
[0587] L₃ is a bond, a non-enzymatically cleavable linker or a non-cleavable linker;
[0588] L₄ is a bond, an enzymatically cleavable linker or a self-immolative spacer.
   In certain embodiments the Linker Unit (LU) is -L₁-L₂-L₃-L₄-, wherein
[0589] L₁ is a bond, -A₁-, -A₁X²— or —X²—;
[0590] L₂ is a bond, -A₂-, or -A₂X²—;
[0591] L₃ is a bond, -A₃-, or -A₃X²—;
[0592] L₄ is a bond, -A₄-, -A₄X²—,

[chemical structure]

[chemical structure]

[0593] A₁ is —C(═O)NH—, —NHC(═O)—, —C(═O)NH(CH₂)ₙ—, —C(═O)NH(C(R⁴)₂)ₙ—, —(O(CH₂)ₙ)ₘ—, —(O(C(R⁴)₂)ₙ)ₘ—, —((CH₂)ₙO)ₘ, —(((C(R⁴)₂)ₙO)ₘ, —((CH₂)ₙO)ₘ(CH₂)ₙ—, —(((C(R⁴)₂)ₙO)ₘC(R⁴)₂)ₙ—, —(CH₂)ₙC(═O)NH—, —(C(R⁴)₂)ₙC(═O)NH—, —(CH₂)ₙNHC(═O)—, —(C(R⁴)₂)ₙNHC(═O)—, —NHC(═O)(CH₂)ₙ—, —NHC(═O)(C(R⁴)₂)ₙ—, —C(═O)NH(CH₂)ₙS—, —C(═O)NH(C(R⁴)₂)ₙS—, —S(CH₂)ₙC(═O)NH—, —S(C(R⁴)₂)ₙC(═O)NH—, —C(═O)NH(CH₂)ₙNHC(═O)(CH₂)ₙ—, —C(═O)NH(C(R⁴)₂)ₙNHC(═O)(C(R⁴)₂)ₙ—, —C(═O)(CH₂)ₙ—, —C(═O)(C(R⁴)₂)ₙ—, —(CH₂)ₙC(═O)—, —(C(R⁴)₂)ₙC(═O)—, —(CH₂)ₙ(O(CH₂)ₙ)ₘNHC(═O)(CH₂)ₙ—, —(C(R⁴)₂)ₙ(O(C(R⁴)₂)ₙ)ₘNHC(═O)(C(R⁴)₂)ₙ—, —(CH₂)ₙNHC(═O)(CH₂)ₙ—, —(C(R⁴)₂)ₙNHC(═O)(C(R⁴)₂)ₙ—, —(CH₂)ₙNH((CH₂)ₙO)ₘ(CH₂)ₙ—, —(C(R⁴)₂)ₙNH((C(R⁴)₂)ₙO)ₘ(C(R⁴)₂)ₙ—, —(O(CH₂)ₙ)ₘNHC(═O)(CH₂)ₙ—, or —(O(C(R⁴)₂)ₙ)ₘNHC(═O)(C(R⁴)₂)ₙ—;
[0594] A₂ is —C(═O)NH—, —C(═O)NH(CH₂)ₙ—, —C(═O)NH(C(R⁴)₂)ₙ—, —(O(CH₂)ₙ)ₘ—, —(O(C(R⁴)₂)ₙ)ₘ—, —((CH₂)ₙO)ₘ—, —(((C(R⁴)₂)ₙO)ₘ—, —((CH₂)ₙO)ₘ(CH₂)ₙ—, —(((C(R⁴)₂)ₙO)ₘC(R⁴)₂)ₙ—, —(CH₂)ₙC(═O)NH—, —(C(R⁴)₂)ₙC(═O)NR⁴—, —(CH₂)ₙNHC(═O)—, —(C(R⁴)₂)ₙNHC(═O)—, —NHC(═O)(CH₂)ₙ—, —NHC(═O)(C(R⁴)₂)ₙ—, —C(═O)NH(CH₂)ₙS—, —C(═O)NH(C(R⁴)₂)ₙS—, —S(CH₂)ₙC(═O)NH—, —S(C(R⁴)₂)ₙC(═O)NH—, —(CH₂)ₙS—, —(C(R⁴)₂)ₙS—, —S(CH₂)ₙ—, —S(C(R⁴)₂)ₙ—, —(CH₂)ₙNH—, —(C(R⁴)₂)ₙNH—, —C(═O)NH(CH₂)ₙNHC(═O)(CH₂)ₙ—, —C(═O)NH(C(R⁴)₂)ₙNHC(═O)(C(R⁴)₂)ₙ—, —C(═O)(CH₂)ₙ—, —C(═O)(C(R⁴)₂)ₙ—, —(CH₂)ₙC(═O)—, —(C(R⁴)₂)ₙC(═O)—, —(CH₂)ₙ(O(CH₂)ₙ)ₘNHC(═O)(CH₂)ₙ—, —(C(R⁴)₂)ₙ(O(C(R⁴)₂)ₙ)ₘNHC(═O)(C(R⁴)₂)ₙ—, —(CH₂)ₙ(O(CH₂)ₙ)ₘOC(═O)NH(CH₂)ₙ—, —(C(R⁴)₂)ₙ(O(C(R⁴)₂)ₙ)ₘOC(═O)NH(C(R⁴)₂)ₙ—, —(CH₂)ₙNHC(═O)(CH₂)ₙ—, —(C(R⁴)₂)ₙNHC(═O)(C(R⁴)₂)ₙ—, —(CH₂)ₙNH((CH₂)ₙO)ₘ(CH₂)ₙ—, —(C(R⁴)₂)ₙNH((C(R⁴)₂)ₙO)ₘ(C(R⁴)₂)ₙ—, —(O(CH₂)ₙ)ₘNHC(═O)(CH₂)ₙ—, —(O(C(R⁴)₂)ₙ)ₘNHC(═O)(C(R⁴)₂)ₙ—,

[chemical structure]

[0595] A₃ is —C(═O)NH—, —C(═O)NH(CH₂)ₙ—, —C(═O)NH(C(R⁴)₂)ₙ—, —(O(CH₂)ₙ)ₘ—, —(O(C(R⁴)₂)ₙ)ₘ—, —((CH₂)ₙO)ₘ—, —(((C(R⁴)₂)ₙO)ₘ—, —((CH₂)ₙO)ₘ(CH₂)ₙ—, —(((C(R⁴)₂)ₙO)ₘC(R⁴)₂)ₙ—, —(CH₂)ₙC(═O)NH—, —(C(R⁴)₂)ₙC(═O)NH—, —(CH₂)ₙNHC(═O)—, —(C(R⁴)₂)ₙNHC(═O)—, —NHC(═O)(CH₂)ₙ—, —NHC(═O)(C(R⁴)₂)ₙ—, —C(═O)NH(CH₂)ₙS—, —C(═O)NH(C(R⁴)₂)ₙS—, —S(CH₂)ₙC(═O)NH—, —S(C(R⁴)₂)ₙC(═O)NH—, —(CH₂)ₙS—, —(C(R⁴)₂)ₙS—, —S(CH₂)ₙ—, —S(C(R⁴)₂)ₙ—, —C(═O)NH(CH₂)ₙNHC(═O)(CH₂)ₙ—, —C(═O)NH(C(R⁴)₂)ₙNHC(═O)(C(R⁴)₂)ₙ—, —C(═O)(CH₂)ₙ—, —C(═O)(C(R⁴)₂)ₙ—, —(CH₂)ₙC(═O)—, —(C(R⁴)₂)ₙC(═O)—, —(CH₂)ₙ(O(CH₂)ₙ)ₘNHC(═O)(CH₂)ₙ—, —(C(R⁴)₂)ₙ(O(C(R⁴)₂)ₙ)ₘNHC(═O)(C(R⁴)₂)ₙ—, —(CH₂)ₙ(O(CH₂)ₙ)ₘOC(═O)NH(CH₂)ₙ—, —(C(R⁴)₂)ₙ(O(C(R⁴)₂)ₙ)ₘOC(═O)NH(C(R⁴)₂)ₙ—, —(CH₂)ₙ(O(CH₂)ₙ)ₘOC(═O)—, —(C(R⁴)₂)ₙ(O(C(R⁴)₂)ₙ)ₘOC(═O)—, —(CH₂)ₙ(O(CH₂)ₙ)ₘOC(═O)—, —(C(R⁴)₂)ₙ(O(C(R⁴)₂)ₙ)ₘOC(═O)—, —(CH₂)ₙNHC(═O)(CH₂)ₙ—, —(C(R⁴)₂)ₙNHC(═O)(C(R⁴)₂)ₙ—, —(O(CH₂)ₙ)ₘNHC(═O)(CH₂)ₙ—, —(O(C(R⁴)₂)ₙ)ₘNHC(═O)(C(R⁴)₂)ₙ—,

[chemical structure]

[0596] A₄ is —C(═O)NH—, —C(═O)NH(CH₂)ₙ—, —C(═O)NH(C(R⁴)₂)ₙ—, —(O(CH₂)ₙ)ₘ—, —(C)(C(R⁴)₂)ₙ)ₘ—, —((CH₂)ₙO)ₘ—, —(((C(R⁴)₂)ₙO)ₘ—, —((CH₂)ₙO)ₘ(CH₂)ₙ—, —(((C(R⁴)₂)ₙO)ₘC(R⁴)₂)ₙ—, —(CH₂)ₙC(═O)NH—, —(C(R⁴)₂)ₙC(═O)NH—, —(CH₂)ₙNHC(═O)—, —(C(R⁴)₂)ₙNHC(═O)—, —NHC(═O)(CH₂)ₙ—, —NHC(═O)(C(R⁴)₂)ₙ—, —C(═O)NH(CH₂)ₙS—, —C(═O)NH(C(R⁴)₂)ₙS—, —S(CH₂)ₙC(═O)NH—, —S(C(R⁴)₂)ₙC(═O)NH—, —C(═O)NH(CH₂)ₙNHC(═O)(CH₂)ₙ—, —C(═O)NH(C(R⁴)₂)ₙNHC(═O)(C(R⁴)₂)ₙ—, —C(═O)(CH₂)ₙ—, —C(═O)(C(R⁴)₂)ₙ—, —(CH₂)ₙC(═O)—, —(C(R⁴)₂)ₙC(═O)—, —(CH₂)ₙ(O(CH₂)ₙ)ₘNHC(═O)(CH₂)ₙ—, —(C(R⁴)₂)ₙ(O(C(R⁴)₂)ₙ)ₘNHC(═O)(C(R⁴)₂)ₙ—, —(CH₂)ₙNHC(═O)(CH₂)ₙ—, —(C(R⁴)₂)ₙNHC(═O)(C(R⁴)₂)ₙ—, —(CH₂)ₙNH((CH₂)ₙO)ₘ(CH₂)ₙ—, —(C(R⁴)₂)ₙNH((C(R⁴)₂)ₙO)ₘ(C(R⁴)₂)ₙ—, —(O(CH₂)ₙ)ₘNHC(═O)(CH₂)ₙ—, or —(O(C(R⁴)₂)ₙ)ₘNHC(═O)(C(R⁴)₂)ₙ—;
[0597] each X² is independently selected from a bond,

[chemical structure]

[chemical structure]

[chemical structure]

—S—, —Si(OH)₂O—,

[chemical structure]

CHR⁴(CH₂)ₙC(═O)NH—, —CHR⁴(CH₂)ₙNHC(═O)—, —C(═O)NH— and —NHC(═O)—;
[0598] each R⁴ is independently selected from H, C₁₋₄alkyl, —C(═O)OH and —OH,
[0599] each R⁵ is independently selected from H, C₁₋₄alkyl, phenyl or C₁₋₄alkyl substituted with 1 to 3 —OH groups;
[0600] each R⁶ is independently selected from H, fluoro, benzyloxy substituted with —C(═O)OH, benzyl substituted with —C(═O)OH, C₁₋₄alkoxy substituted with —C(═O)OH and C₁₋₄alkyl substituted with —C(═O)OH;
[0601] R⁷ is independently selected from H, phenyl and pyridine;
[0602] R⁸ is independently selected from

[chemical structure]

[0603] R⁹ is independently selected from H and C₁₋₆haloalkyl;
[0604] each n is independently selected from 1, 2, 3, 4, 5, 6, 7, 8 and 9, and
[0605] each m is independently selected from 1, 2, 3, 4, 5, 6, 7, 8 and 9.
   In certain embodiments the Linker Unit (LU) is -L₁-L₂-L₃-L₄-, wherein
[0606] L₁ is a bond, -A₁-, -A₁X²— or —X²—;
[0607] L₂ is a bond, -A₂-, or -A₂X²—;
[0608] L₃ is a bond, -A₃-, or -A₃X²—;
[0609] L₄ is a bond, -A₄-, -A₄X²—,

[chemical structure]

[0610] A₁ is —C(═O)NH—, —C(═O)NH(CH₂)ₙ—, —(O(CH₂)ₙ)ₘ—, —((CH₂)ₙO)ₘ—, —((CH₂)ₙO)ₘ(CH₂)ₙ—, —(CH₂)ₙC(═O)NH—, —NHC(═O)(CH₂)ₙ—, —(CH₂)ₙNHC(═O)—, —C(═O)NH(CH₂)ₙS—, —S(CH₂)ₙC(═O)NH—, —C(═O)NH(CH₂)ₙNHC(═O)(CH₂)ₙ—, —C(═O)(CH₂)ₙ—, —(CH₂)ₙC(═O)—, —(CH₂)ₙ(O(CH₂)ₙ)ₘNHC(═O)(CH₂)ₙ—, —(CH₂)ₙNHC(═O)(CH₂)ₙ—, —(CH₂)ₙNH((CH₂)ₙO)ₘ(CH₂)ₙ— or —(O(CH₂)ₙ)ₘNHC(═O)(CH₂)ₙ—;
[0611] A₂ is —C(═O)NH—, —C(═O)NH(CH₂)ₙ—, —(O(CH₂)ₙ)ₘ—, —((CH₂)ₙO)ₘ, —((CH₂)ₙO)ₘ(CH₂)ₙ—, —(CH₂)ₙC(═O)NH—, —NHC(═O)(CH₂)ₙ—, —(CH₂)ₙNHC(═O)—, —C(═O)NH(CH₂)ₙS—, —S(CH₂)ₙC(═O)NH—, —C(═O)NH(CH₂)ₙNHC(═O)(CH₂)ₙ—, —C(═O)(CH₂)ₙ—, —(CH₂)ₙC(═O)—, —(CH₂)ₙ(O(CH₂)ₙ)ₘNHC(═O)(CH₂)ₙ—, —(CH₂)ₙNHC(═O)(CH₂)ₙ—, —(CH₂)ₙNH((CH₂)ₙO)ₘ(CH₂)ₙ—, —(O(CH₂)ₙ)ₘNHC(═O)(CH₂)ₙ— or

[chemical structure]

[0612] A₃ is —C(═O)NH—, —C(═O)NH(CH₂)ₙ—, —(O(CH₂)ₙ)ₘ—, —((CH₂)ₙO)ₘ—, —((CH₂)ₙO)ₘ(CH₂)ₙ—, —(CH₂)ₙC(═O)NH—, —NHC(═O)(CH₂)ₙ—, —(CH₂)ₙNHC(═O)—, —C(═O)NH(CH₂)ₙS—, —S(CH₂)ₙC(═O)NH—, —C(═O)NH(CH₂)ₙNHC(═O)(CH₂)ₙ—, —C(═O)(CH₂)ₙ—, —(CH₂)ₙC(═O)—, —(CH₂)ₙ(O(CH₂)ₙ)ₘNHC(═O)(CH₂)ₙ—, —(CH₂)ₙNHC(═O)(CH₂)ₙ—, —(CH₂)ₙNH((CH₂)ₙO)ₘ(CH₂)ₙ—, —(O(CH₂)ₙ)ₘNHC(═O)(CH₂)ₙ— or

[chemical structure]

[0613] A₄ —C(═O)NH—, —C(═O)NH(CH₂)ₙ—, —(O(CH₂)ₙ)ₘ—, —((CH₂)ₙO)ₘ—, —((CH₂)ₙO)ₘ(CH₂)ₙ—, —(CH₂)ₙC(═O)NH—, —NHC(═O)(CH₂)ₙ—, —(CH₂)ₙNHC(═O)—, —C(═O)NH(CH₂)ₙS—, —S(CH₂)ₙC(═O)NH—, —C(═O)NH(CH₂)ₙNHC(═O)(CH₂)ₙ—, —C(═O)(CH₂)ₙ—, —(CH₂)ₙC(═O)—, —(CH₂)ₙ(O(CH₂)ₙ)ₘNHC(═O)(CH₂)ₙ—, —(CH₂)ₙNHC(═O)(CH₂)ₙ—, —(CH₂)ₙNH((CH₂)ₙO)ₘ(CH₂)ₙ— or —(O(CH₂)ₙ)ₘNHC(═O)(CH₂)ₙ—;
[0614] each X² is independently selected from a bond,

[chemical structure]

—S—, —Si(OH)₂O—,

[chemical structure]

—CHR⁴(CH₂)ₙC(═O)NH—, —CHR⁴(CH₂)ₙNHC(═O)—, —C(═O)NH— and —NHC(═O)—;
[0615] each R⁴ is independently selected from H, C₁₋₄alkyl, —C(═O)OH and —OH,
[0616] each R⁵ is independently selected from H, C₁₋₄alkyl, phenyl or C₁₋₄alkyl substituted with 1 to 3 —OH groups;
[0617] each n is independently selected from 1, 2, 3, 4, 5, 6, 7, 8 and 9, and
[0618] each m is independently selected from 1, 2, 3, 4, 5, 6, 7, 8 and 9.
   In certain embodiments the Linker Unit (LU) is -L₁-L₂-L₃-L₄-, wherein
[0619] L₁ is a bond, -A₁-, -A₁X²— or —X²—;
[0620] L₂ is a bond, -A₂-, or -A₂X²—;
[0621] L₃ is a bond, -A₃-, or -A₃X²—;
[0622] L₄ is a bond, -A₄-, -A₄X²—,

[chemical structure]

[0623] A₁ is —C(═O)NH—, —C(═O)NH(CH₂)ₙ—, —C(═O)NH(CH₂)ₙS—, —(O(CH₂)ₙ)ₘ—, —((CH₂)ₙO)ₘ(CH₂)ₙ—, —NHC(═O)(CH₂)ₙ—, —(CH₂)ₙNHC(═O)—, —C(═O)NH(CH₂)ₙNHC(═O)(CH₂)ₙ—, —(CH₂)ₙNH((CH₂)ₙO)ₘ(CH₂)ₙ— or —(O(CH₂)ₙ)ₘNHC(═O)(CH₂)ₙ—;
[0624] A₂ is —C(═O)NH—, —C(═O)NH(CH₂)ₙ—, —C(═O)NH(CH₂)ₙS—, —(O(CH₂)ₙ)ₘ—, —((CH₂)ₙO)ₘ(CH₂)ₙ—, —NHC(═O)(CH₂)ₙ—, —(CH₂)ₙNHC(═O)—, —C(═O)NH(CH₂)ₙNHC(═O)(CH₂)ₙ—, —(CH₂)ₙNH((CH₂)ₙO)ₘ(CH₂)ₙ—, —(O(CH₂)ₙ)ₘNHC(═O)(CH₂)ₙ— or

[chemical structure]

[0625] A₃ is —C(═O)NH—, —C(═O)NH(CH₂)ₙ—, —C(═O)NH(CH₂)ₙS—, —(O(CH₂)ₙ)ₘ—, —((CH₂)ₙO)ₘ(CH₂)ₙ—, —NHC(═O)(CH₂)ₙ—, —(CH₂)ₙNHC(═O)—, —C(═O)NH(CH₂)ₙNHC(═O)(CH₂)ₙ—, —(CH₂)ₙNH((CH₂)ₙO)ₘ(CH₂)ₙ—, —(O(CH₂)ₙ)ₘNHC(═O)(CH₂)ₙ— or

[chemical structure]

[0626] A₄ is —C(═O)NH—, —C(═O)NH(CH₂)ₙ—, —C(═O)NH(CH₂)ₙS—, —(O(CH₂)ₙ)ₘ—, —((CH₂)ₙO)ₘ(CH₂)ₙ—, —NHC(═O)(CH₂)ₙ—, —(CH₂)ₙNHC(═O)—, —C(═O)NH(CH₂)ₙNHC(═O)(CH₂)ₙ—, —(CH₂)ₙNH((CH₂)ₙO)ₘ(CH₂)ₙ— or —(O(CH₂)ₙ)ₘNHC(═O)(CH₂)ₙ—;
[0627] each X² is independently selected from a bond,

[chemical structure]

[chemical structure]

[chemical structure]

—S—, —Si(OH)₂O—,

[chemical structure]

CHR⁴(CH₂)ₙC(═O)NH—, —CHR⁴(CH₂)ₙNHC(═O)—, —C(═O)NH— and —NHC(═O)—;
[0628] each R⁴ is independently selected from H, C₁₋₄alkyl, —C(═O)OH and —OH,
[0629] each R⁵ is independently selected from H, C₁₋₄alkyl, phenyl or C₁₋₄alkyl substituted with 1 to 3 —OH groups;
[0630] each R⁶ is independently selected from H, fluoro, benzyloxy substituted with —C(═O)OH, benzyl substituted with —C(═O)OH, C₁₋₄alkoxy substituted with —C(═O)OH and C₁₋₄alkyl substituted with —C(═O)OH;
[0631] R⁷ is independently selected from H, phenyl and pyridine;
[0632] R⁸ is independently selected from

[chemical structure]

[0633] R⁹ is independently selected from H and C₁₋₆haloalkyl;
[0634] each n is independently selected from 1, 2, 3, 4, 5, 6, 7, 8 and 9, and
[0635] each m is independently selected from 1, 2, 3, 4, 5, 6, 7, 8 and 9.

[0636] In certain embodiments of any of the compounds or methods described herein, L₁ is —C(═O)—NH—CH₂—CH₂—S-[L₂-L₃-L₄-TG]. (Portions of these formulas depicted in brackets such as [L₂-L₃-L₄-TG] are added to the formula being described in order to identify which open valence of the formula is attached to the bracket-enclosed part of the remainder of the structure.)

[0637] In certain embodiments of any of the compounds or methods described herein, L₂ is selected from:

[chemical structure]

[0638] In certain embodiments of any of the compounds or methods described herein, L₃ is selected from —(CH₂)₂₋₆—C(═O)-[L₄-TG]; —(CH₂)₂₋₆—NH-[L₄-TG]; (CH₂)₂₋₆—S-[L₄-TG]; —(CH₂)₂₋₆—Z-[L₄-TG]; and —(CH₂)₂₋₆—Z—C(═O)-[L₄-TG], where Z is O, NH or S.

[0639] In certain embodiments of any of the compounds or methods described herein, L₄ is a bond or a val-cit linker of this formula:

[chemical structure]

When L₄ is a val-cit linker, L₃ is preferably —(CH₂)₂₋₆—C(═O),

[0640] In certain embodiments of any of the compounds or methods described herein, TG is a maytansinoid such as DM1 or DM4, or a dolostatin 10 compound, e.g. auristatins MMAF or MMAE, or a calicheamicin such as N-acetyl-γ-calicheamicin, or a label or dye such as rhodamine or tetramethylrhodamine.

[0641] As used herein, a “linker” is any chemical moiety that is capable of linking an antibody or a fragment thereof to a terminal group. Linkers can be susceptible to cleavage, such as, acid-induced cleavage, light-induced cleavage, peptidase-induced cleavage, esterase-induced cleavage, and disulfide bond cleavage, at conditions under which the compound or the antibody remains active. Alternatively, linkers can be substantially resistant to cleavage. A linker may or may not include a self-immolative spacer.

[0642] Non-limiting examples of the non-enzymatically cleavable linkers as used herein to conjugate a terminal group (TG) to the modified antibodies or fragment thereof provided herein include, acid-labile linkers, linkers containing a disulfide moiety, linkers containing a triazole moiety, linkers containing a hydrazine moiety, linkers containing a thioether moiety, linkers containing a diazo moiety, linkers containing an oxime moiety, linkers containing an amide moiety and linkers containing an acetamide moiety.

[0643] Non-limiting examples of the enzymatically cleavable linkers as used herein to conjugate a terminal group (TG) to the modified antibodies or fragment thereof provided herein include, but are not limited to, linkers which are cleaved by a protease, linkers which are cleaved by an amidase, and linkers which are cleaved by β-glucuronidase.

[0644] In certain embodiments, such enzyme cleavable linkers are linkers which are cleaved by cathepsin, including cathepsin Z, cathepsin B, cathepsin H and cathepsin C. In certain embodiments the enzymatically cleavable linker is a dipeptide cleaved by cathepsin, including dipeptides cleaved by cathepsin Z, cathepsin B, cathepsin H or cathepsin C. In certain embodiments the enzymatically cleavable linker is a cathepsin B-cleavable peptide linker. In certain embodiments the enzymatically cleavable linker is a cathepsin B-cleavable dipeptide linker. In certain embodiments the enzymatically cleavable linker is a cathepsin B-cleavable dipeptide linker is valine-citrulline or phenylalanine-lysine. Other non-limiting examples of the enzymatically cleavable linkers as used herein conjugate a terminal group (TG) to the modified antibodies or fragment thereof provided herein include, but are not limited to, linkers which are cleaved by β-glucuronidase, e.g.,

[chemical structure]

### See Ducry et al, Bioconjugate Chem, vol. 21(1), 5-13 (2010).

[0645] “Self-immolative spacers” are bifunctional chemical moieties covalently linked at one termini to a first chemical moiety and at the other termini to a second chemical moiety, thereby forming a stable tripartate molecule. Upon cleavage of a bond between the self-immolative spacer and the first chemical moiety, self-immolative spacers undergoing rapid and spontaneous intramolecular reactions and thereby separate from the second chemical moiety. These intramolecular reactions generally involve electronic rearrangements such as 1,4, or 1,6, or 1,8 elimination reactions or cyclizations to form highly favored five- or six-membered rings. In certain embodiments of the present invention, the first moiety is an enzyme cleavable linker and this cleavage results from an enzymatic reaction, while in other embodiments the first moiety is an acid labile linker and this cleavage occurs due to a change in pH. As applied to the present invention, the second moiety is the “Label” group as defined herein. In certain embodiments, cleavage of the first moiety from the self-immolative spacer results from cleavage by a proteolytic enzyme, while in other embodiments it results from cleaved by a hydrolase. In certain embodiments, cleavage of the first moiety from the self-immolative spacer results from cleavage by a cathepsin enzyme.

[0646] In certain embodiments, the enzyme cleavable linker is a peptide linker and the self-immolative spacer is covalently linked at one of its ends to the peptide linker and covalently linked at its other end to a drug moiety. This tripartite molecule is stable and pharmacologically inactive in the absence of an enzyme, but which is enzymatically cleavable by enzyme at the bond covalently linking the spacer moiety and the peptide moiety. The peptide moiety is cleaved from the tripartate molecule which initiates the self-immolating character of the spacer moiety, resulting in spontaneous cleavage of the bond covalently linking the spacer moiety to the drug moiety, to thereby effect release of the drug in pharmacologically active form.

[0647] Non-limiting examples of the self-immolative spacer optionally used in the conjugation of a terminal group (TG) to the modified antibodies or fragment thereof provided herein include, but are not limited to, moieties which include a benzyl carbonyl moiety, a benzyl ether moiety, a 4-aminobutyrate moiety, a hemithioaminal moiety or a N-acylhemithioaminal moiety.

[0648] Other examples of self-immolative spacers include, but are not limited to, p-aminobenzyloxycarbonyl groups, aromatic compounds that are electronically similar to the p-aminobenzyloxycarbonyl group, such as 2-aminoimidazol-5-methanol derivatives and ortho or para-aminobenzylacetals. In certain embodiments, self-immolative spacers used herein which undergo cyclization upon amide bond hydrolysis, include substituted and unsubstituted 4-aminobutyric acid amides and 2-aminophenylpropionic acid amides.

[0649] In certain embodiments, the self-immolative spacer is

[chemical structure]

while in other embodiments the self-immolative spacer is

[chemical structure]

where n is 1 or 2. In other embodiments the self-immolative spacer is

[chemical structure]

where n is 1 or 2. In other embodiments the self-immolative spacer is

[chemical structure]

where n is 1 or 2. In other embodiments the self-immolative spacer is

[chemical structure]

where n is 1 or 2. In other embodiments the self-immolative spacer is

[chemical structure]

where n is 1 or 2.

[0650] Scheme (Ib) illustrates the post-translational modification of the modified antibodies or fragment thereof provided herein wherein the Linker Unit (LU) is -L₁-L₂-L₃-L₄-.

[chemical structure]

where R₂, L₁, L₂, L₃, L₄ and TG are as defined herein.

[0651] The CoA analogues of Scheme (Ia) and Scheme (Ib) may be obtained by total chemical synthesis, however the CoA analogues of Scheme (Ia) and Scheme (Ib) are preferably obtained by a chemoenzymatic process wherein pantetheine analogues are chemically synthesized and then biosynthetically converted into the corresponding CoA analogue (see Kristine M. Clarke et al., “In Vivo Reporter Labeling of Proteins via Metabolic Delivery of Coenzyme A Analogues”, J. Am. Chem. Soc., 2005, 127, p. 11234-11235 and Jordan L. Meier et al., “Synthesis and Evaluation of Bioorthogonal Pantetheine Analogues for in Vivo Protein Modification”, J. Am. Chem. Soc., 2006, 128, p. 12174-12184). The biosynthetic conversion for CoA analogues of Scheme (Ia) is shown below:

[chemical structure]

while the biosynthetic conversion for CoA analogues of Scheme (Ib) is shown below:

[chemical structure]

where LU, L₁, L₂, L₃, L₄ and TG are as defined herein.

[0652] In certain embodiments the biosynthetic conversion occurs “in-vivo”, wherein the pantetheine analogue enters a cell from the surrounding media whereby once inside the cell it is converted by the CoA enzymatic pathway into the corresponding CoA analogue. In a specific embodiment, E. coli is used for the biosynthetic conversion of pantetheine analogues into the corresponding CoA analogues, wherein the pantetheine analogue enters E. coli from the surrounding media and once inside the cell the pantetheine analogue is initially phosphorylated by the pantothenate kinase (PanK or CoaA) using adenosine-5′-triphosphate (ATP), then adenylated by the phosphopantetheine adenylyltransferase (PPAT or CoaD) to give the dephospho-CoA analogue and then further phosphorylated by the dephosphocoenzyme A kinase (DPCK or CoaE) to yield the CoA analogue.

[0653] In other embodiments the biosynthetic conversion occurs “in-vitro”, wherein the enzymatic CoA pathway is reconstituted with the pantetheine analogue, whereby it is converted “in-vitro” by the reconstituted CoA enzymatic pathway into the corresponding CoA analogue. In a specific embodiment of “in-vitro” conversion, the reconstituted CoA enzymatic pathway is the E. coli CoA enzymatic pathway, wherein the pantetheine analogue is initially phosphorylated by CoaA and ATP, then adenylated by CoaD to give the dephospho-CoA analogue and then further phosphorylated by CoaE to yield the CoA analogue.

[0654] In certain embodiments the Linker Unit (LU) is —C(═O)NH(CH₂)₂S-L₂-L₃-L₄- and R₂ is —P(═O)(OH)₂, and in such an embodiment the terminal group is linked to CoA. Scheme (Ic) illustrates the post-translational modification of the modified antibodies or fragment thereof provided herein for the specific embodiment wherein the PPTase catalyzes the reaction between the conserved serine residue in the incorporated short peptide tag and a terminal group (TG) linked to coenzyme A (CoA):

[chemical structure]

where L₂, L₃, L₄ and TG are as defined herein

[0655] In certain embodiments, the modified antibodies or fragment thereof provided herein are site-specifically labeled by a one-step method as shown in Scheme (Ia), Scheme (Ib) and Scheme (Ic), wherein a terminal group linked to CoA or a CoA analogue reacts with the conserved serine of the short peptide tag engineered into the antibody.

The one step method includes the steps of:
[0656] (a) providing a modified antibody or fragment thereof which has been engineered to contain a small peptide tag, and wherein the peptide tag is a substrate of an enzyme having 4′-phosphopantetheinyl transferase activity, and
[0657] (b) labeling the modified antibody or fragment thereof with a terminal group by incubating the modified antibody or fragment thereof with an enzyme having 4′-phosphopantetheinyl transferase activity in the presence of a compound having the structure of Formula (A):

[chemical structure]

wherein:
[0658] R₂, Linker Unit (LU) and TG are as described herein.

[0659] In such One-Step methods using a compound of Formula (A) the terminal group (TG) is thereby conjugated to the modified antibody or fragment thereof via a linker having the structure according to Formula (I-a). The linker of Formula (I-a) is attached to the small peptide tag by a phosphodiester bond formed between the 4′-phosphopantetheinyl moiety and the hydroxyl group of the conserved serine residue of the short peptide tag engineered into the antibody:

[chemical structure]

where LU is as defined herein and the * denotes that the 4′-phosphopantetheinyl moiety is attached to the small peptide tag.

[0660] In certain embodiments, the one step method includes the steps of:
[0661] (a) providing a modified antibody or fragment thereof which has been engineered to contain a small peptide tag, and wherein the peptide tag is a substrate of an enzyme having 4′-phosphopantetheinyl transferase activity, and
[0662] (b) labeling the modified antibody or fragment thereof with a terminal group by incubating the modified antibody or fragment thereof with an enzyme having 4′-phosphopantetheinyl transferase activity in the presence of a compound having the structure of Formula (B):

[chemical structure]

where R₂, L₁, L₂, L₃, L₄ and TG are as defined herein.

[0663] In such One-Step methods using a compound of Formula (B) described above the terminal group is thereby attached to the modified antibody or fragment thereof via a linker having the structure according to Formula (I-b). The linker of Formula (I-b) is attached to the small peptide tag by a phosphodiester bond formed between the 4′-phosphopantetheinyl moiety and the hydroxyl group of the conserved serine residue of the short peptide tag engineered into the antibody:

[chemical structure]

where L₁, L₂, L₃ and L₄ are as defined herein and the * denotes that the 4′-phosphopantetheinyl moiety is attached to the small peptide tag.
In other embodiments, the one step method includes the steps of:
[0664] (a) providing a modified antibody or fragment thereof which has been engineered to contain a small peptide tag, and wherein the peptide tag is a substrate of an enzyme having 4′-phosphopantetheinyl transferase activity, and
[0665] (b) labeling the modified antibody or fragment thereof with a terminal group by incubating the modified antibody or fragment thereof with an enzyme having 4′-phosphopantetheinyl transferase activity in the presence of a compound having the structure of Formula (C):

[chemical structure]

where L₂, L₃, L₄ and TG are as defined herein.

[0666] In such One-Step methods using a compound of Formula (C) described above the terminal group is thereby attached to the modified antibody or fragment thereof via a linker having the structure according to Formula (I-c). The linker of Formula (I-c) is attached to the small peptide tag by a phosphodiester bond formed between the 4′-phosphopantetheinyl moiety and the hydroxyl group of the conserved serine residue of the short peptide tag engineered into the antibody:

[chemical structure]

where L₂, L₃ and L₄ are as defined herein and the * denotes that the 4′-phosphopantetheinyl moiety is attached to the small peptide tag.

[0667] In certain embodiments of the One-Step Methods described herein, the modified antibody or fragment thereof is contacted with a compound having the structure of Formula (A), Formula (B) or Formula (C) and a 4′-phosphopantetheinyl transferase enzyme that is co-expressed in the same cell as the expressed modified antibody or fragment thereof. In certain embodiments of the One-Step Methods described herein, the modified antibody or fragment thereof is contacted in the cell culture media with a compound having the structure of Formula (A), Formula (B) or Formula (C) and 4′-phosphopantetheinyl transferase enzyme produced in the same or in another cell. In certain embodiments of the One-Step Methods described herein, the 4′-phosphopantetheinyl transferase enzyme is immobilized on solid support. In certain embodiments the solid support is optionally comprised of a polymer on a bead or a column.

[0668] In certain embodiments of methods, compounds and immunoconjugates provided herein: L₁ is -A₁X²—, L₂ is a bond, L₃ is a bond, L₄ is -A₄-, A₁ is —C(═O)NH(CH₂)ₙS—,
[0669] A₄ is —(CH₂)ₙNHC(═O)—, and X² is

[chemical structure]

[0670] In certain embodiments of methods, compounds and immunoconjugates provided herein: L₁ is -A₁X²—, L₂ is a bond, L₃ is a bond, L₄ is -A₄-, A₁ is —C(═O)NH(CH₂)ₙS—, A₄ is —(CH₂)ₙNHC(═O)—; X² is

[chemical structure]

and TG is a fluorescent probe.

[0671] In certain embodiments of the compound of Formula (B) is

[chemical structure]

[0672] In certain embodiments of methods, compounds and immunoconjugates provided herein: L₁ is -A₁X²—, L₂ is a bond, L₃ is a bond, L₄ is -A₄-, A₁ is —C(═O)NH(CH₂)ₙS—, A₄ is —(CH₂)ₙC(═O)—, and X² is

[chemical structure]

[0673] In certain embodiments of methods, compounds and immunoconjugates provided herein: L₁ is -A₁X²—, L₂ is a bond, L₃ is a bond, L₄ is -A₄-, A₁ is —C(═O)NH(CH₂)ₙS—, A₄ is —(CH₂)ₙC(═O)—; X² is

[chemical structure]

and TG is a drug moiety.

[0674] In certain embodiments the compound of Formula (B) is

[chemical structure]

[0675] In certain embodiments of methods, compounds and immunoconjugates provided herein: L₁ is -A₁X²—, L₂ is -A₂-, L₃ is -A₃-, L is

[chemical structure]

A₁ is —C(═O)NH(CH₂)ₙS—, A₂ is —(CH₂)ₙC(═O, A₃ is

[chemical structure]

### and X² is

[chemical structure]

[0677] In certain embodiments of methods, compounds and immunoconjugates provided herein: L₁ is -A₁X²—, L₂ is -A₂-, L₃ is -A₃-, L₄ is

[chemical structure]

A₁ is —C(═O)NH(CH₂)ₙS—, A₂ is —(CH₂)ₙC(═O, A₃ is

[chemical structure]

### X² is

[chemical structure]

and TG is a drug moiety.

[0679] In certain embodiments the compound of Formula (B) is

[chemical structure]

[0680] In certain embodiments of methods, compounds and immunoconjugates provided herein: L₁ is a -A₁X²—, L₂ is a bond-, L₃ is -A₃-, L₄ is a bond, A₁ is —C(═O)NH(CH₂)ₙS—, A₃ is —(CH₂)ₙC(═O)—, and X² is —(CH₂)ₙC(═O)NH—.

[0681] In certain embodiments of methods, compounds and immunoconjugates provided herein: L₁ is a -A₁X²—, L₂ is a bond-, L₃ is -A₃-, L₄ is a bond, A₁ is —C(═O)NH(CH₂)ₙS—, A₃ is —(CH₂)ₙC(═O)—, X² is —(CH₂)ₙC(═O)NH—, and TG is a drug moiety.

[0682] In certain embodiments the compound of Formula (B) is

[chemical structure]

[0683] In certain embodiments of methods, compounds and immunoconjugates provided herein: L₁ is a -A₁X²—, L₂ is a bond, L₃ is -A₃-, L₄ is a bond, A₁ is —C(═O)NH(CH₂)ₙS, A₃ is —(CH₂)ₙC(═O)—, X² is —CHR⁴(CH₂)ₙC(═O)NH—, and R⁴ is —C(═O)OH.

[0684] In certain embodiments of methods, compounds and immunoconjugates provided herein: L₁ is a -A₁X²—, L₂ is a bond, L₃ is -A₃-, L₄ is a bond, A₁ is —C(═O)NH(CH₂)ₙS, A₃ is —(CH₂)ₙC(═O)—, X² is —CHR⁴(CH₂)ₙC(═O)NH—, R⁴ is —C(═O)OH, and TG is a drug moiety.

[0685] In certain embodiments the compound of Formula (B) is

[chemical structure]

[0686] In certain embodiments of methods, compounds and immunoconjugates provided herein: L₁ is -A₁X²—, where A₁ is —C(═O)NH(CH₂)ₙS— and X² is —(CH₂)C(═O)NH—; L₂ is a bond; L₃ is a bond, and L₄ is -A₄- wherein A₄ is —(CH₂)ₙNHC(═O)—.

[0687] In certain embodiments of methods, compounds and immunoconjugates provided herein: L₁ is -A₁X²—, wherein A₁ is —C(═O)NH(CH₂)ₙS— and X² is —(CH₂)C(═O)NH—; L₂ is a bond; L₃ is a bond; L₄ is -A₄-, wherein A₄ is —(CH₂)ₙC(═O)—.

[0688] In certain embodiments of methods, compounds and immunoconjugates provided herein: L₁ is -A₁X²—, wherein A₁ is —C(═O)NH(CH₂)ₙS— and X² is —(CH₂)C(═O)NH—; L₂ is -A₂-, wherein A₂ is —(CH₂)ₙC(═O; L₃ is -A₃-, wherein A₃ is

[chemical structure]

### and L₄ is

[chemical structure]

[0690] In certain embodiments of methods, compounds and immunoconjugates provided herein: L₁ is a -A₁X²—, wherein A₁ is —C(═O)NH(CH₂)ₙS— and X² is —(CH₂)C(═O)NH—; L₂ is a bond-; L₃ is -A₃-, wherein A₃ is —(CH₂)ₙC(═O)—, and L₄ is a bond.

### Two-Step Method

[0691] Alternatively, the modified antibodies or fragment thereof provided herein are site-specifically labeled by a two-step method, wherein, in the first step the ppan prosthetic group of CoA, or modified ppan prosthetic group of the CoA analogue, which contain a functional group (R₁), is attached to the short peptide tag by a phosphodiester bond formed between the 4′-phosphopantetheinyl moiety and the hydroxyl group of the conserved serine residue of the short peptide tag which has been incorporated into the antibody. In the second step a terminal group (TG) linked, or directly attached to, a group which is reactive with the functional group (R₁) is reacted with the functional group (R₁) on the ppan prosthetic group of CoA, or on the modified ppan prosthetic group of the CoA analogue, thereby directly attaching the terminal group to the modified antibody or fragment thereof or attaching the terminal group to the modified antibody or fragment thereof via a Linker Unit (LU).

[0692] One embodiment of the Two-Step Method is shown in Scheme (IIa).

[chemical structure]

wherein X and a corresponding R₁ are as given below in Table 3, and where R₂, A₁, L₂, X₂, L₃, L₄ and TG are as defined herein:

TABLE 3

| X | R₁ |
|---|---|
| a thiol | a thiol, a maleimide or a haloacetamide |
| an azide | an alkyne, a triaryl phosphine, a cyclooctene or an |
| | oxanobornadiene |
| a triaryl phosphine | an azide |
| an oxanobornadiene | an azide |
| an alkyne | an azide |
| an alkene | an azide |
| a cyclooctene | a diaryl tetrazine |
| a diaryl tetrazine | a cyclooctene |
| a monoaryl tetrazine | a norbornene |
| a norbornene | a monoaryl tetrazine |
| an aldehyde | a hydroxylamine or a hydrazine or |
| | NH₂—NH—C(═O)— |
| a ketone | a hydroxylamine or a hydrazine or |
| | NH₂—NH—C(═O)— |
| a hydroxylamine | an aldehyde or a ketone |
| a hydrazine | an aldehyde or a ketone |
| NH₂—NH—C(═O)— | an aldehyde or a ketone |
| a haloacetamide | a thiol |
| a maleimide | a thiol |

The alkene, alkyne, triaryl phosphine, cyclooctene, oxanobornadiene, diaryl tetrazine, monoaryl tetrazine and norbornene of X and R₁ are optionally substituted.
The Two-Step Method of Scheme (IIa) includes the steps of:
[0693] (a) providing a modified antibody or fragment thereof which has been engineered to contain a peptide tag, and wherein the peptide tag is a substrate of an enzyme having 4′-phosphopantetheinyl transferase activity;
[0694] (b) labeling the modified antibody or fragment thereof by:
   [0695] incubating the modified antibody or fragment thereof with an enzyme having 4′-phosphopantetheinyl transferase activity in the presence of a compound of Formula (D),

[chemical structure]

[0696] thereby attaching an activated 4′-phosphopantetheinyl group of Formula (D-a) to the peptide tag;

[chemical structure]

[0697] and
[0698] (c) reacting the activated 4′-phosphopantetheinyl group with a compound of Formula (IIa):

X-L₂-L₃-L₄-TG Formula (II-a),

where X, R₁, R₂, A₁, L₂, L₃, L₄ and TG are as defined herein.

[0699] As a result of the Two-Step Method of Scheme (IIa) the Terminal group is attached to the modified antibody or fragment thereof via a linker having the structure according to Formula (IIb):

[chemical structure]

where A₁, X₂, L₂, L₃ and L₄ are as defined herein and the * denotes that the modified 4′-phosphopantetheinyl moiety is attached to the small peptide tag.

[0700] Another embodiment of the Two-Step Method is shown in Scheme (IIb).

[chemical structure]

where X, R₁, R₂, L₁, A₂, X₂, L₃, L₄ and TG are as defined herein.
The Two-Step Method of Scheme (IIb) includes the steps of:
[0701] (a) providing a modified antibody or fragment thereof which has been engineered to contain a short peptide tag, and wherein the peptide tag is a substrate of an enzyme having 4′-phosphopantetheinyl transferase activity;
[0702] (b) labeling the modified antibody or fragment thereof by:
   [0703] incubating the modified antibody or fragment thereof with an enzyme having 4′-phosphopantetheinyl transferase activity in the presence of a compound of Formula (E),

[chemical structure]

thereby attaching an activated 4′-phosphopantetheinyl group of Formula (E-a) to the short peptide tag;

[chemical structure]

[0704] and
[0705] (c) reacting the activated 4′-phosphopantetheinyl group with a compound of Formula (II-c):

X-L₃-L₄-TG Formula (II-c),

where X, R₁, R₂, L₁, A₂, L₃, L₄ and TG are as defined herein.

[0706] As a result of the Two-Step Method of Scheme (IIb) the terminal group is attached to the modified antibody or fragment thereof via a linker having the structure according to Formula (II-d):

[chemical structure]

where L₁, A₂, X₂, L₃ and L₄ are as defined herein and the * denotes that the modified 4′-phosphopantetheinyl moiety is attached to the small peptide tag.

[0707] Another embodiment of the Two-Step Method is shown in Scheme (II-c).

[chemical structure]

where X, R₁, R₂, L₁, L₂, X₂, A₃, L₄ and TG are as defined herein.
The Two-Step Method of Scheme (IIc) includes the steps of:
[0708] (a) providing a modified antibody or fragment thereof which has been engineered to contain a short peptide tag, and wherein the peptide tag is a substrate of an enzyme having 4′-phosphopantetheinyl transferase activity;
[0709] (b) labeling the modified antibody or fragment thereof by:
   [0710] incubating the modified antibody or fragment thereof with an enzyme having 4′-phosphopantetheinyl transferase activity in the presence of a compound of Formula (F),

[chemical structure]

thereby attaching an activated 4′-phosphopantetheinyl group of Formula (F-a) to the short peptide tag;

[chemical structure]

[0711] and
[0712] (c) reacting the activated 4′-phosphopantetheinyl group with a compound of Formula (IIe):

X-L₄-TG Formula (II-e),

where X, R₁, R₂, L₁, L₂, L₃, L₄ and TG are as defined herein.

[0713] As a result of the Two-Step Method of Scheme (IIc) the terminal group is attached to the modified antibody or fragment thereof via a linker having the structure according to Formula (II-f):

[chemical structure]

where L₁, L₂, A₃, X₂ and L₄ are as defined herein and the * denotes that the modified 4′-phosphopantetheinyl moiety is attached to the small peptide tag.

[0714] Another embodiment of the Two-Step Method is shown in Scheme (IId).

[chemical structure]

where X, R₁, R₂, L₁, L₂, L₃, A₄, X₂ and TG are as defined herein.
The Two-Step Method of Scheme (IId) includes the steps of:
[0715] (a) providing a modified antibody or fragment thereof which has been engineered to contain a short peptide tag, and wherein the peptide tag is a substrate of an enzyme having 4′-phosphopantetheinyl transferase activity;
[0716] (b) labeling the modified antibody or fragment thereof by:
   [0717] incubating the modified antibody or fragment thereof with an enzyme having 4′-phosphopantetheinyl transferase activity in the presence of a compound of Formula (G),

[chemical structure]

thereby attaching an activated 4′-phosphopantetheinyl of Formula (G-a) to the short peptide tag;

[chemical structure]

[0718] and
[0719] (c) reacting the activated 4′-phosphopantetheinyl group with a compound of Formula (II-g):

X-TG Formula (II-g),

where X, R₁, R₂, L₁, L₂, L₃, L₄ and TG are as defined herein.

[0720] As a result of the Two-Step Method of Scheme (IId) the terminal group is attached to the modified antibody or fragment thereof via a linker having the structure according to Formula (II-h):

[chemical structure]

where L₁, L₂, L₃, A₄ and X₂ are as defined herein and the * denotes that the modified 4′-phosphopantetheinyl moiety is attached to the small peptide tag.

[0721] In certain embodiments of the Two-Step Methods described herein, the modified antibody or fragment thereof is contacted with a compound having the structure of Formula (D), Formula (E), Formula (F) or Formula (G) and a 4′-phosphopantetheinyl transferase enzyme that is co-expressed in the same cell as the expressed modified antibody or fragment thereof. In certain embodiments of the Two-Step Methods described herein, the modified antibody or fragment thereof is contacted in the cell culture media with a compound having the structure of Formula (D), Formula (E), Formula (F) or Formula (G) and 4′-phosphopantetheinyl transferase enzyme produced in the same or in another cell. In certain embodiments of the Two-Step Methods described herein, the 4′-phosphopantetheinyl transferase enzyme is immobilized on solid support. In certain embodiments the solid support is optionally comprised of a polymer on a bead or a column.

[0722] Table 4 shows certain embodiments of the activated 4′-phosphopantetheinyl groups of Formula (D-a) and compounds of Formula (II-a) used in the Two-step methods and the Three-step methods described herein and the resulting modified serine located in the modified antibody or fragment thereof. Note A₁, L₂, L³, L₄, R₅, R₆, R₇, R₈ and TG are as defined herein, and Y is

[chemical structure]

TABLE 4

| [chemical structure] | X—L₂—L₃—L₄—TG Formula (IIa) | [chemical structure] |
|---|---|---|
| [chemical structure] | HC≡C—L₂—L₃—L₄—TG | [chemical structure] |
| [chemical structure] | HC≡C—L₂—L₃—L₄—TG | [chemical structure] |
| [chemical structure] | N₃—L₂—L₃—L₄—TG | [chemical structure] |
| [chemical structure] | N₃—L₂—L₃—L₄—TG | [chemical structure] |
| [chemical structure] | NH₂—O—L₂—L₃—L₄—TG | [chemical structure] |
| [chemical structure] | NH₂—O—L₂—L₃—L₄—TG | [chemical structure] |
| [chemical structure] | CH₃C(═O)—L₂—L₃—L₄—TG | [chemical structure] |
| [chemical structure] | HC(═O)—L₂—L₃—L₄—TG | [chemical structure] |
| [chemical structure] | HS—L₂—L₃—L₄—TG | [chemical structure] |
| [chemical structure] | [chemical structure] | [chemical structure] |
| [chemical structure] | [chemical structure] | [chemical structure] |
| [chemical structure] | HS—L₂—L₃—L₄—TG | [chemical structure] |
| [chemical structure] | [chemical structure] | [chemical structure] |
| [chemical structure] | HS—L₂—L₃—L₄—TG | [chemical structure] |
| [chemical structure] | NH₂—NH—C(═O)—L₂—L₃—L₄—TG | [chemical structure] |
| [chemical structure] | NH₂—NH—C(═O)—L₂—L₃—L₄—TG | [chemical structure] |
| [chemical structure] | R₅C(═O)—L₂—L₃—L₄—TG | [chemical structure] |
| [chemical structure] | HC(═O)—L₂—L₃—L₄—TG | [chemical structure] |
| [chemical structure] | HS—L₂—L₃—L₄—TG | [chemical structure] |
| [chemical structure] | [chemical structure] | [chemical structure] |
| [chemical structure] | N₃—L₂—L₃—L₄—TG | [chemical structure] |
| [chemical structure] | [chemical structure] | [chemical structure] |
| [chemical structure] | N₃—L₂—L₃—L₄—TG | [chemical structure] |
| [chemical structure] | [chemical structure] | [chemical structure] |
| [chemical structure] | N₃—L₂—L₃—L₄—TG | [chemical structure] |
| [chemical structure] | [chemical structure] | [chemical structure] |
| [chemical structure] | [chemical structure] | [chemical structure] |
| [chemical structure] | [chemical structure] | [chemical structure] |
| [chemical structure] | [chemical structure] | [chemical structure] |
| [chemical structure] | N₃—L₂—L₃—L₄—TG | [chemical structure] |
| [chemical structure] | [chemical structure] | [chemical structure] |
| [chemical structure] | [chemical structure] | [chemical structure] |
| [chemical structure] | [chemical structure] | [chemical structure] |
| [chemical structure] | [chemical structure] | [chemical structure] |
| [chemical structure] | N₃—L₂—L₃—L₄—TG | [chemical structure] |

[0723] Table 5 shows certain embodiments of the activated 4′-phosphopantetheinyl groups of Formula (E-a) and compounds of Formula (II-c) used in the Two-step methods and the Three-step methods described herein and the resulting modified serine located in the modified antibody or fragment thereof. Note L₁, A₂, L₃, L₄, R₅, R₆, R₇, R₈ and TG are as defined herein, and Y is

[chemical structure]

TABLE 5

| [chemical structure] | X—L₃—L₄—TG Formula (II-c) | [chemical structure] |
|---|---|---|
| [chemical structure] | HC≡C—L₃—L₄—TG | [chemical structure] |
| [chemical structure] | HC≡C—L₃—L₄—TG | [chemical structure] |
| [chemical structure] | N₃—L₃—L₄—TG | [chemical structure] |
| [chemical structure] | N₃—L₃—L₄—TG | [chemical structure] |
| [chemical structure] | NH₂—O—L₃—L₄—TG | [chemical structure] |
| [chemical structure] | NH₂—O—L₃—L₄—TG | [chemical structure] |
| [chemical structure] | CH₃C(═O)—L₃—L₄—TG | [chemical structure] |
| [chemical structure] | HC(═O)—L₃—L₄—TG | [chemical structure] |
| [chemical structure] | HS—L₃—L₄—TG | [chemical structure] |
| [chemical structure] | [chemical structure] | [chemical structure] |
| [chemical structure] | [chemical structure] | [chemical structure] |
| [chemical structure] | HS—L₃—L₄—TG | [chemical structure] |
| [chemical structure] | [chemical structure] | [chemical structure] |
| [chemical structure] | HS—L₃—L₄—TG | [chemical structure] |
| [chemical structure] | NH₂—NH—C(═O)—L₃—L₄—TG | [chemical structure] |
| [chemical structure] | NH₂—NH—C(═O)—L₃—L₄—TG | [chemical structure] |
| [chemical structure] | R₅C(═O)—L₃—L₄—TG | [chemical structure] |
| [chemical structure] | HC(═O)—L₃—L₄—TG | [chemical structure] |
| [chemical structure] | SH—L₃—L₄—TG | [chemical structure] |
| [chemical structure] | [chemical structure] | [chemical structure] |
| [chemical structure] | N₃—L₃—L₄—TG | [chemical structure] |
| [chemical structure] | [chemical structure] | [chemical structure] |
| [chemical structure] | N₃—L₃—L₄—TG | [chemical structure] |
| [chemical structure] | [chemical structure] | [chemical structure] |
| [chemical structure] | N₃—L₃—L₄—TG | [chemical structure] |
| [chemical structure] | [chemical structure] | [chemical structure] |
| [chemical structure] | [chemical structure] | [chemical structure] |
| [chemical structure] | [chemical structure] | [chemical structure] |
| [chemical structure] | [chemical structure] | [chemical structure] |
| [chemical structure] | N₃—L₃—L₄—TG | [chemical structure] |
| [chemical structure] | [chemical structure] | [chemical structure] |
| [chemical structure] | [chemical structure] | [chemical structure] |
| [chemical structure] | [chemical structure] | [chemical structure] |
| [chemical structure] | [chemical structure] | [chemical structure] |
| [chemical structure] | N₃—L₃—L₄—TG | [chemical structure] |

[0724] Table 6 shows certain embodiments of the activated 4′-phosphopantetheinyl groups of Formula (F-a) and compounds of Formula (II-e) used in the Two-step methods and the Three-step methods described herein and the resulting modified serine located in the modified antibody or fragment thereof. Note L₁, L₂, A₃, L₄, R₅, R₆, R₇, R₈ and TG are as defined herein, and Y is

[chemical structure]

TABLE 6

| [chemical structure] | X—L₄—TG Formula (II-e) | [chemical structure] |
|---|---|---|
| [chemical structure] | HC≡C—L₄—TG | [chemical structure] |
| [chemical structure] | HC≡C—L₄—TG | [chemical structure] |
| [chemical structure] | N₃—L₄—TG | [chemical structure] |
| [chemical structure] | N₃—L₄—TG | [chemical structure] |
| [chemical structure] | NH₂—O—L₄—TG | [chemical structure] |
| [chemical structure] | NH₂—O—L₄—TG | [chemical structure] |
| [chemical structure] | CH₃C(═O)—L₄—TG | [chemical structure] |
| [chemical structure] | HC(═O)—L₄—TG | [chemical structure] |
| [chemical structure] | HS—L₄—TG | [chemical structure] |
| [chemical structure] | [chemical structure] | [chemical structure] |
| [chemical structure] | [chemical structure] | [chemical structure] |
| [chemical structure] | HS—L₄—TG | [chemical structure] |
| [chemical structure] | [chemical structure] | [chemical structure] |
| [chemical structure] | HS—L₄—TG | [chemical structure] |
| [chemical structure] | NH₂—NH—C(═O)—L₄—TG | [chemical structure] |
| [chemical structure] | NH₂—NH—C(═O)—L₄—TGI | [chemical structure] |
| [chemical structure] | R₅C(═O)—L₄—TG | [chemical structure] |
| [chemical structure] | HC(═O)—L₄—TG | [chemical structure] |
| [chemical structure] | HS—L₄—TG | [chemical structure] |
| [chemical structure] | [chemical structure] | [chemical structure] |
| [chemical structure] | N₃—L₄—TG | [chemical structure] |
| [chemical structure] | [chemical structure] | [chemical structure] |
| [chemical structure] | N₃—L₄—TG | [chemical structure] |
| [chemical structure] | [chemical structure] | [chemical structure] |
| [chemical structure] | N₃—L₄—TG | [chemical structure] |
| [chemical structure] | [chemical structure] | [chemical structure] |
| [chemical structure] | [chemical structure] | [chemical structure] |
| [chemical structure] | [chemical structure] | [chemical structure] |
| [chemical structure] | [chemical structure] | [chemical structure] |
| [chemical structure] | N₃—L₄—TG | [chemical structure] |
| [chemical structure] | [chemical structure] | [chemical structure] |
| [chemical structure] | [chemical structure] | [chemical structure] |
| [chemical structure] | [chemical structure] | [chemical structure] |
| [chemical structure] | [chemical structure] | [chemical structure] |
| [chemical structure] | N₃—L₄—TG | [chemical structure] |

[0725] Table 7 shows certain embodiments of the activated 4′-phosphopantetheinyl groups of Formula (G-a) and compounds of Formula (II-g) used in the Two-step methods and the Three-step methods described herein and the resulting modified serine located in the modified antibody or fragment thereof. Note L₁, L₂, L₃, A₄, R₅, R₆, R₇, R₈ and TG are as defined herein, and Y is

[chemical structure]

TABLE 7

| [chemical structure] | X—TG Formula (II-g) | [chemical structure] |
|---|---|---|
| [chemical structure] | HC≡C—TG | [chemical structure] |
| [chemical structure] | HC≡C—TG | [chemical structure] |
| [chemical structure] | N₃—TG | [chemical structure] |
| [chemical structure] | N₃—TG | [chemical structure] |
| [chemical structure] | NH₂—O—TG | [chemical structure] |
| [chemical structure] | NH₂—O—TG | [chemical structure] |
| [chemical structure] | CH₃C(═O)—TG | [chemical structure] |
| [chemical structure] | HC(═O)—TG | [chemical structure] |
| [chemical structure] | HS—TG | [chemical structure] |
| [chemical structure] | [chemical structure] | [chemical structure] |
| [chemical structure] | [chemical structure] | [chemical structure] |
| [chemical structure] | HS—TG | [chemical structure] |
| [chemical structure] | [chemical structure] | [chemical structure] |
| [chemical structure] | HS—TG | [chemical structure] |
| [chemical structure] | NH₂—NH—C(═O)—TG | [chemical structure] |
| [chemical structure] | NH₂—NH—C(═O)—TG | [chemical structure] |
| [chemical structure] | R₅C(═O)—TG | [chemical structure] |
| [chemical structure] | HC(═O)—TG | [chemical structure] |
| [chemical structure] | HS—TG | [chemical structure] |
| [chemical structure] | [chemical structure] | [chemical structure] |
| [chemical structure] | N₃—TG | [chemical structure] |
| [chemical structure] | [chemical structure] | [chemical structure] |
| [chemical structure] | N₃—TG | [chemical structure] |
| [chemical structure] | [chemical structure] | [chemical structure] |
| [chemical structure] | N₃—TG | [chemical structure] |
| [chemical structure] | [chemical structure] | [chemical structure] |
| [chemical structure] | [chemical structure] | [chemical structure] |
| [chemical structure] | [chemical structure] | [chemical structure] |
| [chemical structure] | [chemical structure] | [chemical structure] |
| [chemical structure] | N₃—TG | [chemical structure] |
| [chemical structure] | [chemical structure] | [chemical structure] |
| [chemical structure] | [chemical structure] | [chemical structure] |
| [chemical structure] | [chemical structure] | [chemical structure] |
| [chemical structure] | [chemical structure] | [chemical structure] |
| [chemical structure] | N₃—TG | [chemical structure] |

### Three-Step Method

[0726] Alternatively, the modified antibodies or fragment thereof provided herein are site-specifically labeled by a three-step method, wherein, in the first step a protected ppan prosthetic group of CoA, or a protected modified ppan prosthetic group of the CoA analogue, is attached to the short peptide tag by a phosphodiester bond formed between the 4′-phosphopantetheinyl moiety and the hydroxyl group of the conserved serine residue of the short peptide tag incorporated into the antibody. In the second step the protected ppan prosthetic group of CoA, or protected modified ppan prosthetic group of the CoA analogue, is deprotected; thereby generating a reactive functional group (R₁). In the third step a terminal group (TG) linked, or directly attached to, a group which is reactive with the functional group (R₁) is reacted with the functional group (R₁) on the ppan prosthetic group of CoA, or on the modified ppan prosthetic group of the CoA analogue, thereby directly attaching the terminal group to the modified antibody or fragment thereof or attaching the terminal group to the modified antibody or fragment thereof via a Linker Unit (LU).

[0727] One embodiment of the Three-Step Method is shown in Scheme (IIIa).

[chemical structure]

wherein X and a corresponding R₁ are as given in Table 3, and where PG is a protecting group and R₂, A₁, L₂, X₂, L₃, L₄ and TG are as defined herein.
The Three-Step Method of Scheme (IIIa) includes the steps of:
[0728] (a) providing a modified antibody or fragment thereof which has been engineered to contain a short peptide tag, and wherein the peptide tag is a substrate of an enzyme having 4′-phosphopantetheinyl transferase activity;
[0729] (b) labeling the modified antibody or fragment thereof by:
   [0730] incubating the modified antibody or fragment thereof with an enzyme having 4′-phosphopantetheinyl transferase activity in the presence of a compound of Formula H,

[chemical structure]

thereby attaching a protected 4′-phosphopantetheinyl group of Formula (H-a) to the short peptide tag;

[chemical structure]

[0731] (c) deprotecting the protected 4′-phosphopantetheinyl group to give an activated 4′-phosphopantetheinyl group of Formula (D-a)

[chemical structure]

[0732] and
[0733] (d) reacting the activated 4′-phosphopantetheinyl group with a compound of Formula (IIa):

X-L₂-L₃-L₄-TG Formula (II-a),

where PG is a protecting group and X, R₁, R₂, A₁, L₂, L₃, L₄ and TG are as defined herein.

[0734] As a result of the Three-Step Method of Scheme (IIIa) the terminal group is attached to the modified antibody or fragment thereof via a linker having the structure according to Formula (IIb):

[chemical structure]

where A₁, X₂, L₂, L₃ and L₄ are as defined herein and the * denotes that the modified 4′-phosphopantetheinyl moiety is attached to the small peptide tag.

[0735] Another embodiment of the Three-Step Method is shown in Scheme (IIIb).

[chemical structure]

where PG is a protecting group and X, R₁, R₂, L₁, A₂, X₂, L₃, L₄ and TG are as defined herein.
The Three-Step Method of Scheme (IIIb) includes the steps of:
[0736] (a) providing a modified antibody or fragment thereof which has been engineered to contain a short peptide tag, and wherein the peptide tag is a substrate of an enzyme having 4′-phosphopantetheinyl transferase activity;
[0737] (b) labeling modified antibody or fragment thereof by:
   [0738] incubating the modified antibody or fragment thereof with an enzyme having 4′-phosphopantetheinyl transferase activity in the presence of a compound of Formula (J),

[chemical structure]

thereby attaching an protected 4′-phosphopantetheinyl group of Formula (I-a) to the short peptide tag;

[chemical structure]

[0739] (c) deprotecting the protected 4′-phosphopantetheinyl group to give an activated 4′-phosphopantetheinyl group of Formula (E-a)

[chemical structure]

[0740] and
[0741] (d) reacting the activated 4′-phosphopantetheinyl group with a compound of Formula (II-c):

X-L₃-L₄-TG Formula (II-c),

where PG is a protecting group and X, R₁, R₂, L₁, A₂, L₃, L₄ and TG are as defined herein.

[0742] As a result of the Three-Step Method of Scheme (IIIb) the terminal group is attached to the modified antibody or fragment thereof via a linker having the structure according to Formula (II-d):

[chemical structure]

where L₁, A₂, X₂, L₃ and L₄ are as defined herein and the * denotes that the modified 4′-phosphopantetheinyl moiety is attached to the small peptide tag.

[0743] Another embodiment of the Three-Step Method is shown in Scheme (IIIc).

[chemical structure]

where PG is a protecting group and X, R₁, R₂, L₁, L₂, X₂, A₃, L₄ and TG are as defined herein.
The Three-Step Method of Scheme (IIIc) includes the steps of:
[0744] (a) providing a modified antibody or fragment thereof which has been engineered to contain a short peptide tag, and wherein the peptide tag is a substrate of an enzyme having 4′-phosphopantetheinyl transferase activity;
[0745] (b) labeling the modified antibody or fragment thereof by:
   [0746] incubating the modified antibody or fragment thereof with an enzyme having 4′-phosphopantetheinyl transferase activity in the presence of a compound of Formula (K),

[chemical structure]

thereby attaching an protected 4′-phosphopantetheinyl group of Formula (K-a) to the short peptide tag;

[chemical structure]

[0747] (c) deprotecting the protected 4′-phosphopantetheinyl group to give an activated 4′-phosphopantetheinyl group of Formula (F-a)

[chemical structure]

[0748] and
[0749] (d) reacting the activated 4′-phosphopantetheinyl group with a compound of Formula (IIe):

X-L₄-TG Formula (II-e),

where PG is a protecting group and X, R₁, R₂, L₁, L₂, L₃, L₄ and TG are as defined herein.

[0750] As a result of the Two-Step Method of Scheme (IIIc) the terminal group is attached to the modified antibody or fragment thereof via a linker having the structure according to Formula (II-f):

[chemical structure]

where L₁, L₂, A₃, X₂ and L₄ are as defined herein and the * denotes that the modified 4′-phosphopantetheinyl moiety is attached to the small peptide tag.

[0751] Another embodiment of the Three-Step Method is shown in Scheme (IIId).

[chemical structure]

where PG is a protecting group and X, R₁, R₂, L₁, L₂, L₃, A₄, X₂ and TG are as defined herein.
The Three-Step Method of Scheme (IIId) includes the steps of:
[0752] (a) providing a modified antibody or fragment thereof which has been engineered to contain a short peptide tag, and wherein the peptide tag is a substrate of an enzyme having 4′-phosphopantetheinyl transferase activity;
[0753] (b) labeling the modified antibody or fragment thereof by:
   [0754] incubating the modified antibody or fragment thereof with an enzyme having 4′-phosphopantetheinyl transferase activity in the presence of a compound of Formula (L),

[chemical structure]

thereby attaching an activated 4′-phosphopantetheinyl of Formula (L-a) to the short peptide tag;

[chemical structure]

[0755] (c) deprotecting the protected 4′-phosphopantetheinyl group to give an activated 4′-phosphopantetheinyl group of Formula (G-a)

[chemical structure]

[0756] and
[0757] (d) reacting the activated 4′-phosphopantetheinyl group with a compound of Formula (II-g):

X-TG Formula (II-g),

where PG is a protecting group X, R₁, R₂, L₁, L₂, L₃, L₄ and TG are as defined herein.

[0758] As a result of the Three-Step Method of Scheme (IIId) the terminal group is attached to the modified antibody or fragment thereof via a linker having the structure according to Formula (II-h):

[chemical structure]

where L₁, L₂, L₃, A₄ and X₂ are as defined herein and the * denotes that the modified 4′-phosphopantetheinyl moiety is attached to the small peptide tag.

[0759] Scheme (IIIe) shows a certain embodiment of the Three-Step Method where the modified antibodies or fragment thereof provided herein are site-specifically labeled by a CoA analogue where the thiol of the 4′-phosphopantetheinyl prosthetic group is protected. In step 1 the protected CoA analogue reacts with the conserved serine of the short peptide tag engineered into the antibody thereby attaching the prosthetic group containing the protected thiol to the short peptide tag through the formation of a phosphodiester bond with the hydroxyl group of the conserved serine residue of the short peptide tag. In the second step the thiol protecting group is removed and the resulting modified antibody or fragment thereof having a pendant 4′-phosphopantetheinyl group is reacted with a thiol reactive group linked to a terminal group (TG).

[chemical structure]

where X_{SH}, protecting group (PG), R₂, A₂, L₃, L₄ and TG are as defined herein.

[0760] Scheme (IIIf) shows a certain embodiment of the Three-Step Method where the modified antibodies or fragment thereof provided herein are site-specifically labeled using a CoA where the thiol of the 4′-phosphopantetheinyl prosthetic group is protected. In step 1 the protected CoA reacts with the conserved serine of the short peptide tag engineered into the antibody thereby attaching the prosthetic group containing the protected thiol to the short peptide tag through the formation of a phosphodiester bond with the hydroxyl group of the conserved serine residue of the short peptide tag. In the second step the thiol protecting group is removed and the resulting modified antibody or fragment thereof having a pendant 4′-phosphopantetheinyl group is reacted with a thiol reactive group linked to a terminal group (TG).

[chemical structure]

where X_{SH}, protecting group (PG), R₂, A₂, L₃, L₄ and TG are as defined herein.
In the Three-Step Method of Scheme (IIIe) and Scheme (IIIf), the thiol protecting group includes, but is not limited to, acetyl, acetamidomethyl, benzyl, 4-methylbenzyl, 4-methoxybenzyl, trityl, methoxytrityl, t-butyl, t-butylthiol and 3-nitro-2-pyridinesulphenyl. The thiol reactive group of Scheme (IIIe) and Scheme (IIIf) includes, but is not limited to, maleimide, a haloacetyl, a haloacetamide, a pyridyldisulfide and a vinyl sulfone.
The Three-Step Method of Scheme (IIIf) includes the steps of:
[0761] (a) providing a modified antibody or fragment thereof which has been engineered to contain a short peptide tag, and wherein the peptide tag is a substrate of an enzyme having 4′-phosphopantetheinyl transferase activity;
[0762] (b) labeling the modified antibody or fragment thereof by:
   [0763] (i) incubating the modified antibody or fragment thereof with an enzyme having 4′-phosphopantetheinyl transferase activity in the presence of a thiol protected coenzyme A, thereby attaching the thiol protected prosthetic group of coenzyme A to the short peptide tag;
   [0764] (ii) deprotecting the thiol group thereby forming a 4′-phosphopantetheinyl group having a pendant thiol,
   [0765] and
   [0766] (iii) reacting the pendant thiol of the 4′-phosphopantetheinyl group with a compound of Formula (IIIf):

X_{SH}-L₂-L₃-L₄-TG Formula (IIIf).

where X_{SH} is a thiol reactive group including, but not limited to, a maleimide, a haloacetyl, a haloacetamide, a pyridyldisulfide and a vinyl sulfone. A₂, L₃, L₄ and TG are as defined herein. In addition, in the Two-Step Method of Scheme (IIIf) the terminal group is attached to the modified antibody or fragment thereof via a linker having the structure according to Formula (III-a):

[chemical structure]

The * denotes the 4′-phosphopantetheinyl moiety is attached to the small peptide tag and L₂, L₃, L₄ and TG are as defined herein. In this embodiment X₂ is a group formed by reaction of X_{SH} and the pendant thiol, including, but not limited to,

[chemical structure]

### and —S—S—.

[0767] In certain embodiments X_{SH}-L₂-L₃-L₄-TG is

[0768] wherein:

[chemical structure]

[0769] X₁ is a bond, —C(═O)—, —NH—, —NHC(═O)—, (C(═O)NH(CH₂)ₙ)ₘ—,

[chemical structure]

In other embodiments X_{SH}-L₂-L₃-L₄-TG is

[chemical structure]

[0770] In certain embodiments of the Three-Step Methods described herein, the modified antibody or fragment thereof is contacted with a compound having the structure of Formula (H), Formula (J), Formula (K) or Formula (L) and a 4′-phosphopantetheinyl transferase enzyme that is co-expressed in the same cell as the expressed modified antibody or fragment thereof. In certain embodiments of the Two-Step Methods described herein, the modified antibody or fragment thereof is contacted in the cell culture media with a compound having the structure of Formula (H), Formula (J), Formula (K) or Formula (L) and 4′-phosphopantetheinyl transferase enzyme co-expressed by the same or another cell. In certain embodiments of the Two-Step Methods described herein, the 4′-phosphopantetheinyl transferase enzyme is immobilized on solid support. In certain embodiments the solid support is optionally comprised of a polymer on a bead or a column.

[0771] In certain embodiments of the Three-Step Method, the modified antibody or fragment thereof will be contacted with a 4′-phosphopantetheinyl transferase enzyme that is coexpressed in the same cell. In certain embodiments of the Three-Step Method, the thiol protected coenzyme A is acetyl-coenzyme A. In certain embodiments of the Three-Step Method, the modified antibody or fragment thereof is contacted in the cell culture media with the thiol protected coenzyme A and a 4′-phosphopantetheinyl transferase enzyme co-expressed by the same or another cell. In certain embodiments of the Three-Step Method, the 4′-phosphopantetheinyl transferase enzyme is immobilized on solid support. The solid support is optionally comprised of a polymer on a bead or a column.

[0772] In certain embodiments of the One-Step Method, Two-Step Methods or the Three-Step Methods described herein, the modified antibody or fragment thereof is contacted, depending on the Method used, with a compound having the structure of Formula (A), Formula (B), Formula (C), Formula (D), Formula (E), Formula (F), Formula (G), Formula (H), Formula (J), Formula (K) or Formula (L) and a 4′-phosphopantetheinyl transferase enzyme at temperatures between 0 and 37 degree Celsius in buffer or media adjusted to pH values between 3 and 10, preferably between 7 and 9 and most preferably around 8, for reaction times between 5 mins and 48 hours.

[0773] In certain embodiments of the One-Step Method, Two-Step Methods or the Three-Step Methods described herein, the modified antibody or fragment thereof is contacted, depending on the Method used, with a compound having the structure of Formula (A), Formula (B), Formula (C), Formula (D), Formula (E), Formula (F), Formula (G), Formula (H), Formula (J), Formula (K) or Formula (L) in the presence of 4′-phosphopantetheinyl transferase in solution. In other embodiments of the One-Step Method, Two-Step Methods or the Three-Step Methods described herein, the modified antibody or fragment thereof is contacted, depending on the Method used, with a compound having the structure of Formula (A), Formula (B), Formula (C), Formula (D), Formula (E), Formula (F), Formula (G), Formula (H), Formula (J), Formula (K) or Formula (L) in the presence of 4′-phosphopantetheinyl transferase in cell media. In certain embodiments of the One-Step Method, Two-Step Methods or the Three-Step Methods described herein, the modified antibody or fragment thereof is contacted, depending on the Method used, with a compound having the structure of Formula (A), Formula (B), Formula (C), Formula (D), Formula (E), Formula (F), Formula (G), Formula (H), Formula (J), Formula (K) or Formula (L) in the presence of 4′-phosphopantetheinyl transferase inside a cell.

[0774] In certain embodiments of the One-Step Method, Two-Step Methods or the Three-Step Methods described herein, the modified antibody or fragment thereof is contacted, depending on the Method used, with a compound having the structure of Formula (A), Formula (B), Formula (C), Formula (D), Formula (E), Formula (F), Formula (G), Formula (H), Formula (J), Formula (K) or Formula (L) in the presence of 4′-phosphopantetheinyl transferase, wherein the 4′-phosphopantetheinyl transferase is immobilized on a surface. In certain embodiments the surface is polymer bead.

[0775] In certain embodiments of the One-Step Method, Two-Step Methods or the Three-Step Methods described herein, the modified antibody or fragment thereof is contacted, depending on the Method used, with a compound having the structure of Formula (A), Formula (B), Formula (C), Formula (D), Formula (E), Formula (F), Formula (G), Formula (H), Formula (J), Formula (K) or Formula (L) in the presence of 4′-phosphopantetheinyl transferase, wherein the modified antibody or fragment thereof is immobilized on a surface. In certain embodiments the surface is polymer bead.

[0776] In certain embodiments, the modified antibody or fragment thereof provided herein are labeled with a terminal group (“TG”)-to-antibody ratio of 1, 2, 3, 4, 5, 6, 7, or 8, wherein the modified antibody or fragment thereof contains 1, 2, 3, 4, 5, 6, 7, or 8 short peptide tags located in the structural loop of the antibody and where the short peptide tags are substrates of Sfp 4′-phosphopantetheinyl transferase, AcpS 4′-phosphopantetheinyl transferase, T. maritima 4′-phosphopantetheinyl transferase, C. thermocellum 4′-phosphopantetheinyl transferase, human 4′-phosphopantetheinyl transferase, or a mutant form thereof. For example, a TG-to-antibody ratio of 4 is achieved by conjugating the terminal group to four copies of inserted S6 tags, or to four copies of inserted ybbR tags or to four copies of inserted A1 tags, or to a combination of two copies of inserted S6 tags and two copies of inserted ybbR tags. In certain embodiments, the modified antibodiesor fragment thereof provided herein are labeled with two different terminal groups using two different peptide tags and two different 4′-phosphopantetheinyl transferases. By way of example, two copies of the A1 tag are conjugated to a first terminal group using the AcpS 4′-phosphopantetheinyl transferase. Then a second terminal group is attached to two copies of an S6 tag using the Sfp 4′-phosphopantetheinyl transferase (see, e.g., Zhou et al., ACS Chem. Biol. 2:337-346, 2007).

[0777] In certain embodiments, the modified antibodies or fragment thereof provided herein are labeled with a terminal group (TG)-to-antibody ratio (e.g., DAR) of 1, 2, 3, 4, 5, 6, 7, or 8, wherein the modified antibody or fragment thereof contains 1, 2, 3, 4, 5, 6, 7, or 8 short peptide tags located in the structural loop of the antibody and where the short peptide tags are substrates of Sfp 4′-phosphopantetheinyl transferase, AcpS 4′-phosphopantetheinyl transferase, T. maritima 4′-phosphopantetheinyl transferase, C. thermocellum 4′-phosphopantetheinyl transferase, human 4′-phosphopantetheinyl transferase, or a mutant form thereof. For example, a TG-to-antibody ratio of 4 is achieved by conjugating a drug moiety to four copies of inserted S6 tags, or to four copies of inserted ybbR tags, or to four copies of inserted A1 tags, or to a combination of two copies of inserted S6 tags and two copies of inserted ybbR tags. In certain embodiments, the modified antibodies or fragment thereof provided herein are labeled with two different drug moieties using two different peptide tags and two different 4′-phosphopantetheinyl transferases. By way of example, two copies of the A1 tag are conjugated to a first drug moiety using the AcpS 4′-phosphopantetheinyl transferase. Then a second drug moiety is attached to two copies of an S6 tag using the Sfp 4′-phosphopantetheinyl transferase (see, e.g., Zhou et al., ACS Chem. Biol. 2:337-346, 2007).

### 3. Further Alteration of the Framework of Fc Region

[0778] The present invention provides site-specific labeled immunoconjugates. The immunoconjugates of the invention may comprise modified antibodies or fragments thereof that further comprise modifications to framework residues within V_{H} and/or V_{L}, e.g. to improve the properties of the antibody. Typically such framework modifications are made to decrease the immunogenicity of the antibody. For example, one approach is to “back-mutate” one or more framework residues to the corresponding germline sequence. More specifically, an antibody that has undergone somatic mutation may contain framework residues that differ from the germline sequence from which the antibody is derived. Such residues can be identified by comparing the antibody framework sequences to the germline sequences from which the antibody is derived. To return the framework region sequences to their germline configuration, the somatic mutations can be “back-mutated” to the germline sequence by, for example, site-directed mutagenesis. Such “back-mutated” antibodies are also intended to be encompassed by the invention.

[0779] Another type of framework modification involves mutating one or more residues within the framework region, or even within one or more CDR regions, to remove T-cell epitopes to thereby reduce the potential immunogenicity of the antibody. This approach is also referred to as “deimmunization” and is described in further detail in U.S. Patent Publication No. 20030153043 by Carr et al.

[0780] In addition or alternative to modifications made within the framework or CDR regions, antibodies of the invention may be engineered to include modifications within the Fc region, typically to alter one or more functional properties of the antibody, such as serum half-life, complement fixation, Fc receptor binding, and/or antigen-dependent cellular cytotoxicity. Furthermore, an antibody of the invention may be chemically modified (e.g., one or more chemical moieties can be attached to the antibody) or be modified to alter its glycosylation, again to alter one or more functional properties of the antibody. Each of these embodiments is described in further detail below.

[0781] In one embodiment, the hinge region of CH1 is modified such that the number of cysteine residues in the hinge region is altered, e.g., increased or decreased. This approach is described further in U.S. Pat. No. 5,677,425 by Bodmer et al. The number of cysteine residues in the hinge region of CH1 is altered to, for example, facilitate assembly of the light and heavy chains or to increase or decrease the stability of the antibody.

[0782] In another embodiment, the Fc hinge region of an antibody is mutated to decrease the biological half-life of the antibody. More specifically, one or more amino acid mutations are introduced into the CH₂—CH3 domain interface region of the Fc-hinge fragment such that the antibody has impaired Staphylococcyl protein A (SpA) binding relative to native Fc-hinge domain SpA binding. This approach is described in further detail in U.S. Pat. No. 6,165,745 by Ward et al.

[0783] In yet other embodiments, the Fc region is altered by replacing at least one amino acid residue with a different amino acid residue to alter the effector functions of the antibody. For example, one or more amino acids can be replaced with a different amino acid residue such that the antibody has an altered affinity for an effector ligand but retains the antigen-binding ability of the parent antibody. The effector ligand to which affinity is altered can be, for example, an Fc receptor or the Cl component of complement. This approach is described in, e.g., U.S. Pat. Nos. 5,624,821 and 5,648,260, both by Winter et al.

[0784] In another embodiment, one or more amino acids selected from amino acid residues can be replaced with a different amino acid residue such that the antibody has altered Clq binding and/or reduced or abolished complement dependent cytotoxicity (CDC). This approach is described in, e.g., U.S. Pat. No. 6,194,551 by Idusogie et al.

[0785] In another embodiment, one or more amino acid residues are altered to thereby alter the ability of the antibody to fix complement. This approach is described in, e.g., the PCT Publication WO 94/29351 by Bodmer et al. In a specific embodiment, one or more amino acids of an antibody or fragment thereof of the present invention are replaced by one or more allotypic amino acid residues, such as those shown in FIG. 4 for the IgG1 subclass and the kappa isotype. Allotypic amino acid residues also include, but are not limited to, the constant region of the heavy chain of the IgG1, IgG2, and IgG3 subclasses as well as the constant region of the light chain of the kappa isotype as described by Jefferis et al., MAbs. 1:332-338 (2009).

[0786] In yet another embodiment, the Fc region is modified to increase the ability of the antibody to mediate antibody dependent cellular cytotoxicity (ADCC) and/or to increase the affinity of the antibody for an Fcγ receptor by modifying one or more amino acids. This approach is described in, e.g., the PCT Publication WO 00/42072 by Presta. Moreover, the binding sites on human IgG1 for FcγRI, FcγRII, FcγRIII and FcRn have been mapped and variants with improved binding have been described (see Shields et al., J. Biol. Chem. 276:6591-6604, 2001).

[0787] In still another embodiment, the glycosylation of an antibody is modified. For example, an aglycosylated antibody can be made (i.e., the antibody lacks glycosylation). Glycosylation can be altered to, for example, increase the affinity of the antibody for “antigen.” Such carbohydrate modifications can be accomplished by, for example, altering one or more sites of glycosylation within the antibody sequence. For example, one or more amino acid substitutions can be made that result in elimination of one or more variable region framework glycosylation sites to thereby eliminate glycosylation at that site. Such aglycosylation may increase the affinity of the antibody for antigen. Such an approach is described in, e.g., U.S. Pat. Nos. 5,714,350 and 6,350,861 by Co et al.

[0788] Additionally or alternatively, an antibody can be made that has an altered type of glycosylation, such as a hypofucosylated antibody having reduced amounts of fucosyl residues or an antibody having increased bisecting GlcNac structures. Such altered glycosylation patterns have been demonstrated to increase the ADCC ability of antibodies. Such carbohydrate modifications can be accomplished by, for example, expressing the antibody in a host cell with altered glycosylation machinery. Cells with altered glycosylation machinery have been described in the art and can be used as host cells in which to express recombinant antibodies of the invention to thereby produce an antibody with altered glycosylation. For example, EP 1,176,195 by Hang et al. describes a cell line with a functionally disrupted FUT8 gene, which encodes a fucosyl transferase, such that antibodies expressed in such a cell line exhibit hypofucosylation. PCT Publication WO 03/035835 by Presta describes a variant CHO cell line, LecI3 cells, with reduced ability to attach fucose to Asn(297)-linked carbohydrates, also resulting in hypofucosylation of antibodies expressed in that host cell (see also Shields et al., (2002) J. Biol. Chem. 277:26733-26740). PCT Publication WO 99/54342 by Umana et al. describes cell lines engineered to express glycoprotein-modifying glycosyl transferases (e.g., beta(1,4)-N acetylglucosaminyltransferase III (GnTIII)) such that antibodies expressed in the engineered cell lines exhibit increased bisecting GlcNac structures which results in increased ADCC activity of the antibodies (see also Umana et al., Nat. Biotech. 17:176-180, 1999).

[0789] In another embodiment, the antibody is modified to increase its biological half-life. Various approaches are possible. For example, one or more of the following mutations can be introduced: T252L, T254S, T256F, as described in U.S. Pat. No. 6,277,375 to Ward. Alternatively, to increase the biological half-life, the antibody can be altered within the CH1 or C_{L} region to contain a salvage receptor binding epitope taken from two loops of a CH2 domain of an Fc region of an IgG, as described in U.S. Pat. Nos. 5,869,046 and 6,121,022 by Presta et al.

### 4. Antibody Conjugates

[0790] The present invention provides site-specific labeling methods, modified antibodies and fragments thereof, and immunoconjugates prepared accordingly. Using the methods of the invention, a modified antibody or fragments thereof can be conjugated to a label, such as a drug moiety, e.g., an anti-cancer agent, an autoimmune treatment agent, an anti-inflammatory agent, an antifungal agent, an antibacterial agent, an anti-parasitic agent, an anti-viral agent, or an anesthetic agent. An antibody or fragments thereof can also be conjugated using several identical or different labeling moieties combining the methods of the invention with other conjugation methods.

[0791] In certain embodiments, the terminal group of the immunoconjugates of the present invention is selected from a V-ATPase inhibitor, a HSP90 inhibitor, an IAP inhibitor, an mTor inhibitor, a microtubule stabilizer, a microtubule destabilizers, an auristatin, a dolastatin, a maytansinoid, a MetAP (methionine aminopeptidase), an inhibitor of nuclear export of proteins CRM1, a DPPIV inhibitor, proteasome inhibitors, an inhibitors of phosphoryl transfer reactions in mitochondria, a protein synthesis inhibitor, a kinase inhibitor, a CDK2 inhibitor, a CDK9 inhibitor, an Eg5 inhibitor, an HDAC inhibitor, a RNA polymerase inhibitor, a DNA damaging agent, a DNA alkylating agent, a DNA intercalator, a DNA minor groove binder and a DHFR inhibitor.

[0792] Further, the modified antibodies or antibody fragments of the present invention may be conjugated to a therapeutic moiety or drug moiety that modifies a given biological response. Therapeutic moieties or drug moieties are not to be construed as limited to classical chemical therapeutic agents. For example, the drug moiety may be a protein, peptide, or polypeptide possessing a desired biological activity. Such proteins may include, for example, a toxin such as abrin, ricin A, pseudomonas exotoxin, cholera toxin, or diphtheria toxin, a protein such as tumor necrosis factor, α-interferon, β-interferon, nerve growth factor, platelet derived growth factor, tissue plasminogen activator, a cytokine, an apoptotic agent, an anti-angiogenic agent, or, a biological response modifier such as, for example, a lymphokine.

[0793] In one embodiment, the modified antibodies or antibody fragments of the present invention are conjugated to a therapeutic moiety, such as a cytotoxin, a drug (e.g., an immunosuppressant) or a radiotoxin. Examples of cytotoxin include but not limited to, taxanes (see, e.g., International (PCT) Patent Application Nos. WO 01/38318 and PCT/US03/02675), DNA-alkylating agents (e.g., CC-1065 analogs), anthracyclines, tubulysin analogs, duocarmycin analogs, auristatin E, auristatin F, maytansinoids, and cytotoxic agents comprising a reactive polyethylene glycol moiety (see, e.g., Sasse et al., J. Antibiot. (Tokyo), 53, 879-85 (2000), Suzawa et al., Bioorg. Med. Chem., 8, 2175-84 (2000), Ichimura et al., J. Antibiot. (Tokyo), 44, 1045-53 (1991), Francisco et al., Blood (2003) (electronic publication prior to print publication), U.S. Pat. Nos. 5,475,092, 6,340,701, 6,372,738, and 6,436,931, U.S. Patent Application Publication No. 2001/0036923 A1, Pending U.S. patent application Ser. Nos. 10/024,290 and 10/116,053, and International (PCT) Patent Application No. WO 01/49698), taxon, cytochalasin B, gramicidin D, ethidium bromide, emetine, mitomycin, etoposide, tenoposide, vincristine, vinblastine, t. colchicin, doxorubicin, daunorubicin, dihydroxy anthracin dione, mitoxantrone, mithramycin, actinomycin D, 1-dehydrotestosterone, glucocorticoids, procaine, tetracaine, lidocaine, propranolol, and puromycin and analogs or homologs thereof. Therapeutic agents also include, for example, anti-metabolites (e.g., methotrexate, 6-mercaptopurine, 6-thioguanine, cytarabine, 5-fluorouracil decarbazine), ablating agents (e.g., mechlorethamine, thioepa chloraxnbucil, meiphalan, carmustine (BSNU) and lomustine (CCNU), cyclothosphamide, busulfan, dibromomannitol, streptozotocin, mitomycin C, and cis-dichlorodiamine platinum (II) (DDP) cisplatin, anthracyclines (e.g., daunorubicin (formerly daunomycin) and doxorubicin), antibiotics (e.g., dactinomycin (formerly actinomycin), bleomycin, mithramycin, and anthramycin (AMC)), and anti-mitotic agents (e.g., vincristine and vinblastine). (See e.g., Seattle Genetics US20090304721).

[0794] Other examples of therapeutic cytotoxins that can be conjugated to the modified antibodies or antibody fragments of the invention include duocarmycins, calicheamicins, maytansines and auristatins, and derivatives thereof. An example of a calicheamicin antibody conjugate is commercially available (Mylotarg™; Wyeth-Ayerst).

[0795] For further discussion of types of cytotoxins, linkers and methods for conjugating therapeutic agents to antibodies, see also Saito et al., (2003) Adv. Drug Deliv. Rev. 55:199-215; Trail et al., (2003) Cancer Immunol. Immunother. 52:328-337; Payne, (2003) Cancer Cell 3:207-212; Allen, (2002) Nat. Rev. Cancer 2:750-763; Pastan and Kreitman, (2002) Curr. Opin. Investig. Drugs 3:1089-1091; Senter and Springer, (2001) Adv. Drug Deliv. Rev. 53:247-264.

[0796] According to the present invention, modified antibodies or fragments thereof can also be conjugated to a radioactive isotope to generate cytotoxic radiopharmaceuticals, referred to as radioimmunoconjugates. Examples of radioactive isotopes that can be conjugated to antibodies for use diagnostically or therapeutically include, but are not limited to, iodine¹³¹, indium¹¹¹, yttrium⁹⁰, and lutetium¹⁷⁷. Methods for preparing radioimmunoconjugates are established in the art. Examples of radioimmunoconjugates are commercially available, including Zevalin™ (DEC Pharmaceuticals) and Bexxar™ (Corixa Pharmaceuticals), and similar methods can be used to prepare radioimmunoconjugates using the antibodies of the invention. In certain embodiments, the macrocyclic chelator is 1,4,7,10-tetraazacyclododecane-N,N′,N″,N′″-tetraacetic acid (DOTA) which can be attached to the antibody via a linker molecule. Such linker molecules are commonly known in the art and described in Denardo et al., (1998) Clin Cancer Res. 4(10):2483-90; Peterson et al., (1999) Bioconjug. Chem. 10(4):553-7; and Zimmerman et al., (1999) Nucl. Med. Biol. 26(8):943-50, each incorporated by reference in their entireties.

[0797] The present invention further provides modified antibodies or fragments thereof that specifically bind to an antigen conjugated to a heterologous protein or polypeptide (or fragment thereof, preferably to a polypeptide of at least 10, at least 20, at least 30, at least 40, at least 50, at least 60, at least 70, at least 80, at least 90 or at least 100 amino acids) to generate fusion proteins. In particular, the invention provides fusion proteins comprising an antibody fragment described herein (e.g., a Fab fragment, Fd fragment, Fv fragment, F(ab)₂ fragment, a V_{H} domain, a V_{H} CDR, a V_{L} domain or a V_{L} CDR) and a heterologous protein, polypeptide, or peptide.

[0798] Additional fusion proteins may be generated through the techniques of gene-shuffling, motif-shuffling, exon-shuffling, and/or codon-shuffling (collectively referred to as “DNA shuffling”). DNA shuffling may be employed to alter the activities of antibodies of the invention or fragments thereof (e.g., antibodies or fragments thereof with higher affinities and lower dissociation rates). See, generally, U.S. Pat. Nos. 5,605,793, 5,811,238, 5,830,721, 5,834,252, and 5,837,458; Patten et al., (1997) Curr. Opinion Biotechnol. 8:724-33; Harayama, (1998) Trends Biotechnol. 16(2):76-82; Hansson et al., (1999) J. Mol. Biol. 287:265-76; and Lorenzo and Blasco, (1998) Biotechniques 24(2):308-313 (each of these patents and publications are hereby incorporated by reference in its entirety). Antibodies or fragments thereof, or the encoded antibodies or fragments thereof, may be altered by being subjected to random mutagenesis by error-prone PCR, random nucleotide insertion or other methods prior to recombination. A polynucleotide encoding an antibody or fragment thereof that specifically binds to an antigen may be recombined with one or more components, motifs, sections, parts, domains, fragments, etc. of one or more heterologous molecules.

[0799] Moreover, the modified antibodies or fragments thereof of the present invention can be conjugated to marker sequences, such as a peptide to facilitate purification. In preferred embodiments, the marker amino acid sequence is a hexa-histidine peptide (SEQ ID NO:1106), such as the tag provided in a pQE vector (QIAGEN, Inc., 9259 Eton Avenue, Chatsworth, Calif., 91311), among others, many of which are commercially available. As described in Gentz et al., (1989) Proc. Natl. Acad. Sci. USA 86:821-824, for instance, hexa-histidine (SEQ ID NO:1106) provides for convenient purification of the fusion protein. Other peptide tags useful for purification include, but are not limited to, the hemagglutinin (“HA”) tag, which corresponds to an epitope derived from the influenza hemagglutinin protein (Wilson et al., (1984) Cell 37:767), and the “FLAG” tag (A. Einhauer et al., J. Biochem. Biophys. Methods 49: 455-465, 2001). According to the present invention, antibodies or antibody fragments can also be conjugated to tumor-penetrating peptides in order to enhance their efficacy.

[0800] In other embodiments, modified antibodies or antibody fragments of the present invention are conjugated to a diagnostic or detectable agent. Such immunoconjugates can be useful for monitoring or prognosing the onset, development, progression and/or severity of a disease or disorder as part of a clinical testing procedure, such as determining the efficacy of a particular therapy. Such diagnosis and detection can accomplished by coupling the antibody to detectable substances including, but not limited to, various enzymes, such as, but not limited to, horseradish peroxidase, alkaline phosphatase, beta-galactosidase, or acetylcholinesterase; prosthetic groups, such as, but not limited to, streptavidin/biotin and avidin/biotin; fluorescent materials, such as, but not limited to, Alexa Fluor 350, Alexa Fluor 405, Alexa Fluor 430, Alexa Fluor 488, Alexa Fluor 500, Alexa Fluor 514, Alexa Fluor 532, Alexa Fluor 546, Alexa Fluor 555, Alexa Fluor 568, Alexa Fluor 594, Alexa Fluor 610, Alexa Fluor 633, Alexa Fluor 647, Alexa Fluor 660, Alexa Fluor 680, Alexa Fluor 700, Alexa Fluor 750, umbelliferone, fluorescein, fluorescein isothiocyanate, rhodamine, dichlorotriazinylamine fluorescein, dansyl chloride or phycoerythrin; luminescent materials, such as, but not limited to, luminol; bioluminescent materials, such as but not limited to, luciferase, luciferin, and aequorin; radioactive materials, such as, but not limited to, iodine (¹³¹I, ¹²⁵I, ¹²³I, and ¹²¹I,), carbon (¹⁴C), sulfur (³⁵S), tritium (³H), indium (¹¹⁵In, ¹¹³In, ¹¹²In, and ¹¹¹In,), technetium (⁹⁹Tc), thallium (²⁰¹Ti), gallium (⁶⁸Ga, ⁶⁷Ga), palladium (¹⁰³Pd), molybdenum (⁹⁹Mo), xenon (¹³³Xe), fluorine (¹⁸F), ¹⁵³Sm, ¹⁷⁷Lu, ¹⁵⁹Gd, ¹⁴⁹Pm, ¹⁴⁰La, ¹⁷⁵Yb, ¹⁶⁶Ho, ⁹⁰Y, 47Sc, ¹⁸⁶Re, ¹⁸⁸Re, ¹⁴²Pr, ¹⁰⁵Rh, ⁹⁷Ru, ⁶⁸Ge, ⁵⁷Co, ⁶⁵Zn, ⁸⁵Sr, ³²P, ¹⁵³Gd, ¹⁶⁹Yb, ⁵¹Cr, ⁵⁴Mn, ⁷⁵Se, ⁶⁴Cu, ¹¹³Sn, and ¹¹⁷Sn; and positron emitting metals using various positron emission tomographies, and non-radioactive paramagnetic metal ions.

[0801] Modified antibodies or antibody fragments of the invention may also be attached to solid supports, which are particularly useful for immunoassays or purification of the target antigen. Such solid supports include, but are not limited to, glass, cellulose, polyacrylamide, nylon, polystyrene, polyvinyl chloride or polypropylene.

### 5. Pharmaceutical Composition

[0802] To prepare pharmaceutical or sterile compositions including immunoconjugates, the immunoconjugates of the invention are mixed with a pharmaceutically acceptable carrier or excipient. The compositions can additionally contain one or more other therapeutic agents that are suitable for treating or preventing cancer (breast cancer, colorectal cancer, lung cancer, multiple myeloma, ovarian cancer, liver cancer, gastric cancer, pancreatic cancer, acute myeloid leukemia, chronic myeloid leukemia, osteosarcoma, squamous cell carcinoma, peripheral nerve sheath tumors schwannoma, head and neck cancer, bladder cancer, esophageal cancer, Barretts esophageal cancer, glioblastoma, clear cell sarcoma of soft tissue, malignant mesothelioma, neurofibromatosis, renal cancer, melanoma, prostate cancer, benign prostatic hyperplasia (BPH), gynacomastica, and endometriosis).

[0803] Formulations of therapeutic and diagnostic agents can be prepared by mixing with physiologically acceptable carriers, excipients, or stabilizers in the form of, e.g., lyophilized powders, slurries, aqueous solutions, lotions, or suspensions (see, e.g., Hardman et al., Goodman and Gilman's The Pharmacological Basis of Therapeutics, McGraw-Hill, New York, N.Y., 2001; Gennaro, Remington: The Science and Practice of Pharmacy, Lippincott, Williams, and Wilkins, New York, N.Y., 2000; Avis, et al. (eds.), Pharmaceutical Dosage Forms: Parenteral Medications, Marcel Dekker, NY, 1993; Lieberman, et al. (eds.), Pharmaceutical Dosage Forms Tablets, Marcel Dekker, NY, 1990; Lieberman, et al. (eds.) Pharmaceutical Dosage Forms: Disperse Systems, Marcel Dekker, NY, 1990; Weiner and Kotkoskie, Excipient Toxicity and Safety, Marcel Dekker, Inc., New York, N.Y., 2000).

[0804] Selecting an administration regimen for a therapeutic depends on several factors, including the serum or tissue turnover rate of the entity, the level of symptoms, the immunogenicity of the entity, and the accessibility of the target cells in the biological matrix. In certain embodiments, an administration regimen maximizes the amount of therapeutic delivered to the patient consistent with an acceptable level of side effects. Accordingly, the amount of biologic delivered depends in part on the particular entity and the severity of the condition being treated. Guidance in selecting appropriate doses of antibodies, cytokines, and small molecules are available (see, e.g., Wawrzynczak, Antibody Therapy, Bios Scientific Pub. Ltd, Oxfordshire, UK, 1996; Kresina (ed.), Monoclonal Antibodies, Cytokines and Arthritis, Marcel Dekker, New York, N.Y., 1991; Bach (ed.), Monoclonal Antibodies and Peptide Therapy in Autoimmune Diseases, Marcel Dekker, New York, N.Y., 1993; Baert et al., New Engl. J. Med. 348:601-608, 2003; Milgrom et al., New Engl. J. Med. 341:1966-1973, 1999; Slamon et al., New Engl. J. Med. 344:783-792, 2001; Beniaminovitz et al., New Engl. J. Med. 342:613-619, 2000; Ghosh et al., New Engl. J. Med. 348:24-32, 2003; Lipsky et al., New Engl. J. Med. 343:1594-1602, 2000).

[0805] Determination of the appropriate dose is made by the clinician, e.g., using parameters or factors known or suspected in the art to affect treatment or predicted to affect treatment. Generally, the dose begins with an amount somewhat less than the optimum dose and it is increased by small increments thereafter until the desired or optimum effect is achieved relative to any negative side effects. Important diagnostic measures include those of symptoms of, e.g., the inflammation or level of inflammatory cytokines produced.

[0806] Actual dosage levels of the active ingredients in the pharmaceutical compositions of the present invention may be varied so as to obtain an amount of the active ingredient which is effective to achieve the desired therapeutic response for a particular patient, composition, and mode of administration, without being toxic to the patient. The selected dosage level will depend upon a variety of pharmacokinetic factors including the activity of the particular compositions of the present invention employed, or the ester, salt or amide thereof, the route of administration, the time of administration, the rate of excretion of the particular compound being employed, the duration of the treatment, other drugs, compounds and/or materials used in combination with the particular compositions employed, the age, sex, weight, condition, general health and prior medical history of the patient being treated, and like factors known in the medical arts.

[0807] Compositions comprising antibodies or fragments thereof of the invention can be provided by continuous infusion, or by doses at intervals of, e.g., one day, one week, or 1-7 times per week. Doses may be provided intravenously, subcutaneously, topically, orally, nasally, rectally, intramuscular, intracerebrally, or by inhalation. A specific dose protocol is one involving the maximal dose or dose frequency that avoids significant undesirable side effects.

[0808] For the immunoconjugates of the invention, the dosage administered to a patient may be 0.0001 mg/kg to 100 mg/kg of the patient's body weight. The dosage may be between 0.0001 mg/kg and 20 mg/kg, 0.0001 mg/kg and 10 mg/kg, 0.0001 mg/kg and 5 mg/kg, 0.0001 and 2 mg/kg, 0.0001 and 1 mg/kg, 0.0001 mg/kg and 0.75 mg/kg, 0.0001 mg/kg and 0.5 mg/kg, 0.0001 mg/kg to 0.25 mg/kg, 0.0001 to 0.15 mg/kg, 0.0001 to 0.10 mg/kg, 0.001 to 0.5 mg/kg, 0.01 to 0.25 mg/kg or 0.01 to 0.10 mg/kg of the patient's body weight. The dosage of the antibodies or fragments thereof of the invention may be calculated using the patient's weight in kilograms (kg) multiplied by the dose to be administered in mg/kg.

[0809] Doses of the immunoconjugates the invention may be repeated and the administrations may be separated by at least 1 day, 2 days, 3 days, 5 days, 10 days, 15 days, 30 days, 45 days, 2 months, 75 days, 3 months, or at least 6 months. In a specific embodiment, does of the immunoconjugates of the invention are repeated every 3 weeks.

[0810] An effective amount for a particular patient may vary depending on factors such as the condition being treated, the overall health of the patient, the method route and dose of administration and the severity of side effects (see, e.g., Maynard et al., A Handbook of SOPs for Good Clinical Practice, Interpharm Press, Boca Raton, Fla., 1996; Dent, Good Laboratory and Good Clinical Practice, Urch Publ., London, UK, 2001).

[0811] The route of administration may be by, e.g., topical or cutaneous application, injection or infusion by intravenous, intraperitoneal, intracerebral, intramuscular, intraocular, intraarterial, intracerebrospinal, intralesional, or by sustained release systems or an implant (see, e.g., Sidman et al., Biopolymers 22:547-556, 1983; Langer et al., J. Biomed. Mater. Res. 15:167-277, 1981; Langer, Chem. Tech. 12:98-105, 1982; Epstein et al., Proc. Natl. Acad. Sci. USA 82:3688-3692, 1985; Hwang et al., Proc. Natl. Acad. Sci. USA 77:4030-4034, 1980; U.S. Pat. Nos. 6,350,466 and 6,316,024). Where necessary, the composition may also include a solubilizing agent and a local anesthetic such as lidocaine to ease pain at the site of the injection. In addition, pulmonary administration can also be employed, e.g., by use of an inhaler or nebulizer, and formulation with an aerosolizing agent. See, e.g., U.S. Pat. Nos. 6,019,968, 5,985,320, 5,985,309, 5,934,272, 5,874,064, 5,855,913, 5,290,540, and 4,880,078; and PCT Publication Nos. WO 92/19244, WO 97/32572, WO 97/44013, WO 98/31346, and WO 99/66903, each of which is incorporated herein by reference their entirety.

[0812] A composition of the present invention may also be administered via one or more routes of administration using one or more of a variety of methods known in the art. As will be appreciated by the skilled artisan, the route and/or mode of administration will vary depending upon the desired results. Selected routes of administration for the immunoconjugates of the invention include intravenous, intramuscular, intradermal, intraperitoneal, subcutaneous, spinal or other parenteral routes of administration, for example by injection or infusion. Parenteral administration may represent modes of administration other than enteral and topical administration, usually by injection, and includes, without limitation, intravenous, intramuscular, intraarterial, intrathecal, intracapsular, intraorbital, intracardiac, intradermal, intraperitoneal, transtracheal, subcutaneous, subcuticular, intraarticular, subcapsular, subarachnoid, intraspinal, epidural and intrasternal injection and infusion. Alternatively, a composition of the invention can be administered via a non-parenteral route, such as a topical, epidermal or mucosal route of administration, for example, intranasally, orally, vaginally, rectally, sublingually or topically. In one embodiment, the immunoconjugates of the invention is administered by infusion. In another embodiment, the immunoconjugates of the invention is administered subcutaneously.

[0813] If the immunoconjugates of the invention are administered in a controlled release or sustained release system, a pump may be used to achieve controlled or sustained release (see Langer, supra; Sefton, CRC Crit. Ref Biomed. Eng. 14:20, 1987; Buchwald et al., Surgery 88:507, 1980; Saudek et al., N. Engl. J. Med. 321:574, 1989). Polymeric materials can be used to achieve controlled or sustained release of the therapies of the invention (see e.g., Medical Applications of Controlled Release, Langer and Wise (eds.), CRC Pres., Boca Raton, Fla., 1974; Controlled Drug Bioavailability, Drug Product Design and Performance, Smolen and Ball (eds.), Wiley, New York, 1984; Ranger and Peppas, J. Macromol. Sci. Rev. Macromol. Chem. 23:61, 1983; see also Levy et al., Science 228:190, 1985; During et al., Ann. Neurol. 25:351, 1989; Howard et al., J. Neurosurg. 7 1:105, 1989; U.S. Pat. No. 5,679,377; U.S. Pat. No. 5,916,597; U.S. Pat. No. 5,912,015; U.S. Pat. No. 5,989,463; U.S. Pat. No. 5,128,326; PCT Publication No. WO 99/15154; and PCT Publication No. WO 99/20253. Examples of polymers used in sustained release formulations include, but are not limited to, poly(2-hydroxy ethyl methacrylate), poly(methyl methacrylate), poly(acrylic acid), poly(ethylene-co-vinyl acetate), poly(methacrylic acid), polyglycolides (PLG), polyanhydrides, poly(N-vinyl pyrrolidone), poly(vinyl alcohol), polyacrylamide, poly(ethylene glycol), polylactides (PLA), poly(lactide-co-glycolides) (PLGA), and polyorthoesters. In one embodiment, the polymer used in a sustained release formulation is inert, free of leachable impurities, stable on storage, sterile, and biodegradable. A controlled or sustained release system can be placed in proximity of the prophylactic or therapeutic target, thus requiring only a fraction of the systemic dose (see, e.g., Goodson, in Medical Applications of Controlled Release, supra, vol. 2, pp. 115-138, 1984).

[0814] Controlled release systems are discussed in the review by Langer, Science 249:1527-1533, 1990). Any technique known to one of skill in the art can be used to produce sustained release formulations comprising one or more immunoconjugates of the invention. See, e.g., U.S. Pat. No. 4,526,938, PCT publication WO 91/05548, PCT publication WO 96/20698, Ning et al., Radiotherapy & Oncology 39:179-189, 1996; Song et al., PDA Journal of Pharmaceutical Science & Technology 50:372-397, 1995; Cleek et al., Pro. Inn Symp. Control. Rel. Bioact. Mater. 24:853-854, 1997; and Lam et al., Proc. Inn Symp. Control Rel. Bioact. Mater. 24:759-760, 1997, each of which is incorporated herein by reference in their entirety.

[0815] If the immunoconjugates of the invention are administered topically, they can be formulated in the form of an ointment, cream, transdermal patch, lotion, gel, shampoo, spray, aerosol, solution, emulsion, or other form well-known to one of skill in the art. See, e.g., Remington's Pharmaceutical Sciences and Introduction to Pharmaceutical Dosage Forms, 19th ed., Mack Pub. Co., Easton, Pa. (1995). For non-sprayable topical dosage forms, viscous to semi-solid or solid forms comprising a carrier or one or more excipients compatible with topical application and having a dynamic viscosity, in some instances, greater than water are typically employed. Suitable formulations include, without limitation, solutions, suspensions, emulsions, creams, ointments, powders, liniments, salves, and the like, which are, if desired, sterilized or mixed with auxiliary agents (e.g., preservatives, stabilizers, wetting agents, buffers, or salts) for influencing various properties, such as, for example, osmotic pressure. Other suitable topical dosage forms include sprayable aerosol preparations wherein the active ingredient, in some instances, in combination with a solid or liquid inert carrier, is packaged in a mixture with a pressurized volatile (e.g., a gaseous propellant, such as freon) or in a squeeze bottle. Moisturizers or humectants can also be added to pharmaceutical compositions and dosage forms if desired. Examples of such additional ingredients are well-known in the art.

[0816] If the compositions comprising the immunoconjugates are administered intranasally, it can be formulated in an aerosol form, spray, mist or in the form of drops. In particular, prophylactic or therapeutic agents for use according to the present invention can be conveniently delivered in the form of an aerosol spray presentation from pressurized packs or a nebuliser, with the use of a suitable propellant (e.g., dichlorodifluoromethane, trichlorofluoromethane, dichlorotetrafluoroethane, carbon dioxide or other suitable gas). In the case of a pressurized aerosol the dosage unit may be determined by providing a valve to deliver a metered amount. Capsules and cartridges (composed of, e.g., gelatin) for use in an inhaler or insufflator may be formulated containing a powder mix of the compound and a suitable powder base such as lactose or starch.

[0817] Methods for co-administration or treatment with a second therapeutic agent, e.g., a cytokine, steroid, chemotherapeutic agent, antibiotic, or radiation, are known in the art (see, e.g., Hardman et al., (eds.) (2001) Goodman and Gilman's The Pharmacological Basis of Therapeutics, 10.sup.th ed., McGraw-Hill, New York, N.Y.; Poole and Peterson (eds.) (2001) Pharmacotherapeutics for Advanced Practice: A Practical Approach, Lippincott, Williams & Wilkins, Phila., Pa.; Chabner and Longo (eds.) (2001) Cancer Chemotherapy and Biotherapy, Lippincott, Williams & Wilkins, Phila., Pa.). An effective amount of therapeutic may decrease the symptoms by at least 10%; by at least 20%; at least about 30%; at least 40%, or at least 50%.

[0818] Additional therapies (e.g., prophylactic or therapeutic agents), which can be administered in combination with the immunoconjugates of the invention may be administered less than 5 minutes apart, less than 30 minutes apart, 1 hour apart, at about 1 hour apart, at about 1 to about 2 hours apart, at about 2 hours to about 3 hours apart, at about 3 hours to about 4 hours apart, at about 4 hours to about 5 hours apart, at about 5 hours to about 6 hours apart, at about 6 hours to about 7 hours apart, at about 7 hours to about 8 hours apart, at about 8 hours to about 9 hours apart, at about 9 hours to about 10 hours apart, at about 10 hours to about 11 hours apart, at about 11 hours to about 12 hours apart, at about 12 hours to 18 hours apart, 18 hours to 24 hours apart, 24 hours to 36 hours apart, 36 hours to 48 hours apart, 48 hours to 52 hours apart, 52 hours to 60 hours apart, 60 hours to 72 hours apart, 72 hours to 84 hours apart, 84 hours to 96 hours apart, or 96 hours to 120 hours apart from the immunoconjugates of the invention. The two or more therapies may be administered within one same patient visit.

[0819] In certain embodiments, the immunoconjugates of the invention can be formulated to ensure proper distribution in vivo. For example, the blood-brain barrier (BBB) excludes many highly hydrophilic compounds. To ensure that the therapeutic compounds of the invention cross the BBB (if desired), they can be formulated, for example, in liposomes. For methods of manufacturing liposomes, see, e.g., U.S. Pat. Nos. 4,522,811; 5,374,548; and 5,399,331. The liposomes may comprise one or more moieties which are selectively transported into specific cells or organs, thus enhance targeted drug delivery (see, e.g., Ranade, (1989) J. Clin. Pharmacol. 29:685). Exemplary targeting moieties include folate or biotin (see, e.g., U.S. Pat. No. 5,416,016 to Low et al.); mannosides (Umezawa et al., (1988) Biochem. Biophys. Res. Commun. 153:1038); antibodies (Bloeman et al., (1995) FEBS Lett. 357:140; Owais et al., (1995) Antimicrob. Agents Chemother. 39:180); surfactant protein A receptor (Briscoe et al., (1995) Am. J. Physiol. 1233:134); p 120 (Schreier et al, (1994) J. Biol. Chem. 269:9090); see also K. Keinanen; M. L. Laukkanen (1994) FEBS Lett. 346:123; J. J. Killion; I. J. Fidler (1994) Immunomethods 4:273.

[0820] The invention provides protocols for the administration of pharmaceutical composition comprising immunoconjugates of the invention alone or in combination with other therapies to a subject in need thereof. The therapies (e.g., prophylactic or therapeutic agents) of the combination therapies of the present invention can be administered concomitantly or sequentially to a subject. The therapy (e.g., prophylactic or therapeutic agents) of the combination therapies of the present invention can also be cyclically administered. Cycling therapy involves the administration of a first therapy (e.g., a first prophylactic or therapeutic agent) for a period of time, followed by the administration of a second therapy (e.g., a second prophylactic or therapeutic agent) for a period of time and repeating this sequential administration, i.e., the cycle, in order to reduce the development of resistance to one of the therapies (e.g., agents) to avoid or reduce the side effects of one of the therapies (e.g., agents), and/or to improve, the efficacy of the therapies.

[0821] The therapies (e.g., prophylactic or therapeutic agents) of the combination therapies of the invention can be administered to a subject concurrently.

[0822] The term “concurrently” is not limited to the administration of therapies (e.g., prophylactic or therapeutic agents) at exactly the same time, but rather it is meant that a pharmaceutical composition comprising antibodies or fragments thereof the invention are administered to a subject in a sequence and within a time interval such that the antibodies of the invention can act together with the other therapy(ies) to provide an increased benefit than if they were administered otherwise. For example, each therapy may be administered to a subject at the same time or sequentially in any order at different points in time; however, if not administered at the same time, they should be administered sufficiently close in time so as to provide the desired therapeutic or prophylactic effect. Each therapy can be administered to a subject separately, in any appropriate form and by any suitable route. In various embodiments, the therapies (e.g., prophylactic or therapeutic agents) are administered to a subject less than 15 minutes, less than 30 minutes, less than 1 hour apart, at about 1 hour apart, at about 1 hour to about 2 hours apart, at about 2 hours to about 3 hours apart, at about 3 hours to about 4 hours apart, at about 4 hours to about 5 hours apart, at about 5 hours to about 6 hours apart, at about 6 hours to about 7 hours apart, at about 7 hours to about 8 hours apart, at about 8 hours to about 9 hours apart, at about 9 hours to about 10 hours apart, at about 10 hours to about 11 hours apart, at about 11 hours to about 12 hours apart, 24 hours apart, 48 hours apart, 72 hours apart, or 1 week apart. In other embodiments, two or more therapies (e.g., prophylactic or therapeutic agents) are administered to a within the same patient visit.

[0823] The prophylactic or therapeutic agents of the combination therapies can be administered to a subject in the same pharmaceutical composition. Alternatively, the prophylactic or therapeutic agents of the combination therapies can be administered concurrently to a subject in separate pharmaceutical compositions. The prophylactic or therapeutic agents may be administered to a subject by the same or different routes of administration.

[0824] The invention having been fully described, it is further illustrated by the following examples and claims, which are illustrative and are not meant to be further limiting.

### EXAMPLES

### Example 1

### Design of Peptide-Tagged IgG Constructs

[0825] Visual inspection of the NMR structure of the 4′-phosphopantetheinyl transferase (PPTase) Sfp (PDB ID: 2GE1, Koglin et al., (2006) Science 312: 273-276) model with a peptide substrate reveals that the reactive Ser residue of the S6 tag is inserted deeply into the enzyme active site and is positioned near the alpha phosphate of coenzyme A. The peptide substrate adopts a helix-kink-loop conformation with the Ser residue at the kink. Based on these observations, several loops on the surface of IgG antibodies were selected. The selection procedure involved the following steps. We first built a Trastuzumab homology model using human IgG1 B12 antibody (PDB ID: 1 HZH, Saphire et al., (2001) Science 293: 1155-1159) as a template. Next, the loops with significant content of solvent exposed residues were selected and transformed into S6 tag loops.

[0826] To that end, different strategies were exploited: grafting of full-length peptide tag, grafting of truncated peptide tag, and insertions (both truncated and full-length). One example of the grafting of a full-length ybbR tag is exemplified by the mutant anti-hHER2-HC-S132D-K133S-S134L-T135E-S136F-G1371-G138A-T139S-A140K-A141L-L₁₄₂A (SEQ ID NO:102), while the Trastuzumab anti-hHER2-HC-P189G-S190D-S191-S192L-L193S-G194W-T195L (SEQ ID NO:109) mutant constitutes grafting of a truncated S6 tag. Another variant of the grafting strategy was employed, for example, in mutant anti-hHER2-HC-S190G-S191D-S192-L193-G194S-T195W-Q196L-T197L-RLLN-Y198 (SEQ ID NO:113) wherein residues S190 and S191 were mutated to glycine and aspartic acid, respectively, G194 to serine, T195 to tryptophan, Q196 and T197 to leucine and the truncated S6 tag RLLN (SEQ ID NO:1060) was inserted between L197 and Y198. Alternatively, both truncated and full-length peptide tags were inserted into loops between antibody residues.

[0827] Through out the Example section, the peptide-tagged antibodies are named according to the immunoglobulin heavy or light chain, which contains the grafted or inserted peptide tag. For simplicity, the associated unmodified heavy or light chain is not explicitly mentioned. For example, anti-hHER2-HC-T359-GDSLSWLLRLLN-K360 (SEQ ID NO:121) refers to an IgG1, which comprises the corresponding peptide-tagged heavy chain and the associated unmodified kappa light chain anti-hHER2-LC (SEQ ID NO:1131) with X′₅=Ala and X′₆=Val (see FIG. 3). In contrast, the peptide-tagged mAb2 heavy chain constructs are associated with the unmodified lambda light chain mAb2-LC (SEQ ID NO:25). As another example, anti-hHER2-LC-S76D-S77-L78-EFIASKLA-Q79 (SEQ ID NO:30) refers to an IgG1 antibody containing a peptide-tagged light chain that is associated with the unmodified Ig gamma 1 heavy chain anti-hHER2-HC (SEQ ID NO:1130) with X′₁=Lys, X′₂=Glu, X′₃=Met, and X′₄=Ala (see FIG. 3). In cases where the peptide tag(s) is inserted or grafted into the constant region of the heavy or light chain of an antibody, only sequences of the constant region are given.

[0828] In all cases, the peptide tag was mapped on the selected loops in such a way that the reactive Ser residue was at or near the tip of the loop in order to allow a deeper fit into the active site of Sfp enzyme. The complexes between IgG and Sfp enzyme were constructed next and examined for clashes. Those with significant clashes were rejected and the corresponding loops were excluded from the selection.

[0829] To systematically insert the S6 and ybbR tag sequences into structural loops of the constant regions of Trastuzumab IgG1, insertion sites were chosen both by visual inspection of the crystal structure of the human IgG1 B12 antibody (PDB ID: 1 HZH) as well as by calculating the solvent-accessible surface area of residues by using the program ICM from MolSoft LLC.

### Example 2

### Production of Peptide-Tagged IgG Constructs

[0830] The heavy and light chains of Trastuzumab IgG1 were transiently expressed in mammalian cells using the pOG expression vector under the control of a CMV promoter. Peptide tags for labeling with 4′-phosphopantetheinyl transferases were incorporated into Trastuzumab IgG1 at various positions by standard molecular biology methods. All primers used for cloning are listed in Table 8.

[0831] Cell culture and transfection of HEK293F cells was performed using the PEI method as described previously (see for example Erbacher et al., J Gene Med., 1: 210-222 (1999)). Briefly, HEK293F cells were co-transfected with plasmid DNA encoding the heavy and light chains of Trastuzumab (human kappa isotype). The mammalian cells were cultured in FreeStyle™ 293 Expression Medium at 37° C. under 5% CO₂, and were split to 0.7×10⁶ cells/ml one day prior to transfection. Following transfection, the HEK293F cells were cultured for five days before harvest by centrifugation at 2000×g for 30 minutes at 4° C.

[0832] The resulting medium supernatant was filtered through a 0.22-μm-pore-size filter. The filtrate was then loaded at a flow rate of about 1 mL/min on a protein A affinity column that was previously equilibrated with 20 column volumes of PBS. After washing the column with 20 column volumes of PBS, the antibody was eluted with 5 column volumes of 0.1 M sodium acetate (pH 3.0). The eluate was immediately neutralized with 10% (v/v) 1 M Tris/HCl (pH 10). Dialysis into PBS was performed using Slide-a-Lyzer dialysis cassettes with 3.5 or 7.0 kDa molecular weight cut-off (Pierce).

[0833] The purity of the final product was assessed by SDS-PAGE. Protein yields were determined by either the Bradford method or by ultraviolet spectroscopy at 280 nm using an ND-1000 UV-Vis Spectrophotometer. Protein yields of peptide-tagged Trastuzumab IgGs are listed in Table 9.

TABLE 8
DNA sequences of primers used for constructing recombinant PPTase enzymes and
mutants thereof as well as Trastuzumab IgGs with inserted/grafted peptide-tags (HC, heavy
chain; LC, light chain)

| | SEQ ID | | SEQ ID |
|---|---|---|---|
| Sequence name | NO | Sequence | NO |
| anti-hHER2-HC-A118- | 150 | CTGAGCTGGCTGCTGAGACTGCTGAACAGCACCAAGGGCCCCAGCG | 1061 |
| GDSLSWLLRLLN-S119 | | TCTCAGCAGCCAGCTCAGGCTGTCGCCAGCCGAGGAGACGGTGACCAG | 1062 |
| anti-hHER2-HC-S119- | 151 | CTGAGCTGGCTGCTGAGACTGCTGAACACCAAGGGCCCCAGCGTGTTC | 1063 |
| GDSLSWLLRLLN-T120 | | TCTCAGCAGCCAGCTCAGGCTGTCGCCGCTAGCCGAGGAGACGGTGAC | 1064 |
| anti-hHER2-HC-T120- | 152 | CTGAGCTGGCTGCTGAGACTGCTGAACAAGGGCCCCAGCGTGTTCCC | 1065 |
| GDSLSWLLRLLN-K121 | | TCTCAGCAGCCAGCTCAGGCTGTCGCCGGTGCTAGCCGAGGAGACGG | 1066 |
| anti-hHER2-HC-S131- | 153 | CTGAGCTGGCTGCTGAGACTGCTGAACAGCAAGAGCACCAGCGGCGG | 1067 |
| GDSLSWLLRLLN-S132 | | TCTCAGCAGCCAGCTCAGGCTGTCGCCGCTGGGGGCCAGGGGGAAC | 1068 |
| anti-hHER2-HC-S132- | 154 | CTGAGCTGGCTGCTGAGACTGCTGAACAAGAGCACCAGCGGCGGCAC | 1069 |
| GDSLSWLLRLLN-K133 | | TCTCAGCAGCCAGCTCAGGCTGTCGCCGCTGCTGGGGGCCAGGGG | 1070 |
| anti-hHER2-HC-K133- | 155 | CTGAGCTGGCTGCTGAGACTGCTGAACAGCACCAGCGGCGGCACAG | 1071 |
| GDSLSWLLRLLN-S134 | | TCTCAGCAGCCAGCTCAGGCTGTCGCCCTTGCTGCTGGGGGCCAGG | 1072 |
| anti-hHER2-HC-S134- | 156 | CTGAGCTGGCTGCTGAGACTGCTGAACACCAGCGGCGGCACAGCC | 1073 |
| GDSLSWLLRLLN-T135 | | TCTCAGCAGCCAGCTCAGGCTGTCGCCGCTCTTGCTGCTGGGGGCC | 1074 |
| anti-hHER2-HC-T135- | 157 | CTGAGCTGGCTGCTGAGACTGCTGAACAGCGGCGGCACAGCCGCC | 1075 |
| GDSLSWLLRLLN-S136 | | TCTCAGCAGCCAGCTCAGGCTGTCGCCGGTGCTCTTGCTGCTGGGGG | 1076 |
| anti-hHER2-HC-S136- | 158 | CTGAGCTGGCTGCTGAGACTGCTGAACGGCGGCACAGCCGCCCTG | 1077 |
| GDSLSWLLRLLN-G137 | | TCTCAGCAGCCAGCTCAGGCTGTCGCCGCTGGTGCTCTTGCTGCTGGG | 1078 |
| anti-hHER2-HC-G137- | 159 | CTGAGCTGGCTGCTGAGACTGCTGAACGGCACAGCCGCCCTGGGC | 1079 |
| GDSLSWLLRLLN-G138 | | TCTCAGCAGCCAGCTCAGGCTGTCGCCGCCGCTGGTGCTCTTGCTGC | 1080 |
| anti-hHER2-HC-G138- | 160 | CTGAGCTGGCTGCTGAGACTGCTGAACACAGCCGCCCTGGGCTGC | 1081 |
| GDSLSWLLRLLN-T139 | | TCTCAGCAGCCAGCTCAGGCTGTCGCCGCCGCCGCTGGTGCTCTTG | 1082 |
| anti-hHER2-HC-E152- | 161 | CTGAGCTGGCTGCTGAGACTGCTGAACCCCGTGACCGTGTCCTGGAAC | 1083 |
| GDSLSWLLRLLN-P153 | | TCTCAGCAGCCAGCTCAGGCTGTCGCCCTCGGGGAAGTAGTCCTTCACC | 1084 |
| anti-hHER2-HC-P153- | 162 | CTGAGCTGGCTGCTGAGACTGCTGAACGTGACCGTGTCCTGGAACAGCG | 1085 |
| GDSLSWLLRLLN-V154 | | TCTCAGCAGCCAGCTCAGGCTGTCGCCGGGCTCGGGGAAGTAGTCCTTC | 1086 |
| anti-hHER2-HC-N159- | 163 | CTGAGCTGGCTGCTGAGACTGCTGAACAGCGGAGCCCTGACCTCCG | 1087 |
| GDSLSWLLRLLN-S160 | | TCTCAGCAGCCAGCTCAGGCTGTCGCCGTTCCAGGACACGGTCACGGG | 1088 |
| anti-hHER2-HC-S160- | 164 | CTGAGCTGGCTGCTGAGACTGCTGAACGGAGCCCTGACCTCCGGCGTGCAC | 1089 |
| GDSLSWLLRLLN-G161 | | TCTCAGCAGCCAGCTCAGGCTGTCGCCGCTGTTCCAGGACACGGTCACG | 1090 |
| anti-hHER2-HC-G161- | 165 | CTGAGCTGGCTGCTGAGACTGCTGAACGCCCTGACCTCCGGCGTG | 1091 |
| GDSLSWLLRLLN-A162 | | TCTCAGCAGCCAGCTCAGGCTGTCGCCTCCGCTGTTCCAGGACACGG | 1092 |
| anti-hHER2-HC-A162- | 166 | CTGAGCTGGCTGCTGAGACTGCTGAACCTGACCTCCGGCGTGCACAC | 1093 |
| GDSLSWLLRLLN-L163 | | TCTCAGCAGCCAGCTCAGGCTGTCGCCGGCTCCGCTGTTCCAGGACAC | 1094 |
| anti-hHER2-HC-L163- | 167 | CTGAGCTGGCTGCTGAGACTGCTGAACACCTCCGGCGTGCACACCTTC | 389 |
| GDSLSWLLRLLN-T164 | | TCTCAGCAGCCAGCTCAGGCTGTCGCCCAGGGCTCCGCTGTTCCAGG | 390 |
| anti-hHER2-HC-T164- | 168 | CTGAGCTGGCTGCTGAGACTGCTGAACTCCGGCGTGCACACCTTCCC | 391 |
| GDSLSWLLRLLN-S165 | | TCTCAGCAGCCAGCTCAGGCTGTCGCCGGTCAGGGCTCCGCTGTTCC | 392 |
| anti-hHER2-HC-S165- | 169 | CTGAGCTGGCTGCTGAGACTGCTGAACGGCGTGCACACCTTCCCCG | 393 |
| GDSLSWLLRLLN-G166 | | TCTCAGCAGCCAGCTCAGGCTGTCGCCGGAGGTCAGGGCTCCGCTG | 394 |
| anti-hHER2-HC-P171- | 170 | CTGAGCTGGCTGCTGAGACTGCTGAACGCCGTGCTGCAGAGCAGCG | 395 |
| GDSLSWLLRLLN-A172 | | TCTCAGCAGCCAGCTCAGGCTGTCGCCGGGGAAGGTGTGCACGCCG | 396 |
| anti-hHER2-HC-S176- | 171 | CTGAGCTGGCTGCTGAGACTGCTGAACAGCGGCCTGTACAGCCTGTCC | 397 |
| GDSLSWLLRLLN-S177 | | TCTCAGCAGCCAGCTCAGGCTGTCGCCGCTCTGCAGCACGGCGGG | 398 |
| anti-hHER2-HC-S177- | 172 | CTGAGCTGGCTGCTGAGACTGCTGAACGGCCTGTACAGCCTGTCCAGC | 399 |
| GDSLSWLLRLLN-G178 | | TCTCAGCAGCCAGCTCAGGCTGTCGCCGCTGCTCTGCAGCACGGCG | 400 |
| anti-hHER2-HC-P189- | 173 | CTGAGCTGGCTGCTGAGACTGCTGAACAGCAGCAGCCTGGGCACCC | 401 |
| GDSLSWLLRLLN-S190 | | TCTCAGCAGCCAGCTCAGGCTGTCGCCGGGCACTGTCACCACGCTGG | 402 |
| anti-hHER2-HC-S190- | 174 | CTGAGCTGGCTGCTGAGACTGCTGAACAGCAGCCTGGGCACCCAGAC | 403 |
| GDSLSWLLRLLN-S191 | | TCTCAGCAGCCAGCTCAGGCTGTCGCCGCTGGGCACTGTCACCACGC | 404 |
| anti-hHER2-HC-S191- | 175 | CTGAGCTGGCTGCTGAGACTGCTGAACAGCCTGGGCACCCAGACCTAC | 405 |
| GDSLSWLLRLLN-S192 | | TCTCAGCAGCCAGCTCAGGCTGTCGCCGCTGCTGGGCACTGTCACCAC | 406 |
| anti-hHER2-HC-S192- | 176 | CTGAGCTGGCTGCTGAGACTGCTGAACCTGGGCACCCAGACCTACATC | 407 |
| GDSLSWLLRLLN-L193 | | TCTCAGCAGCCAGCTCAGGCTGTCGCCGCTGCTGCTGGGCACTGTCAC | 408 |
| anti-hHER2-HC-L193- | 177 | CTGAGCTGGCTGCTGAGACTGCTGAACGGCACCCAGACCTACATCTGC | 409 |
| GDSLSWLLRLLN-G194 | | TCTCAGCAGCCAGCTCAGGCTGTCGCCCAGGCTGCTGCTGGGCACTG | 410 |
| anti-hHER2-HC-G194- | 178 | CTGAGCTGGCTGCTGAGACTGCTGAACACCCAGACCTACATCTGCAACGTG | 411 |
| GDSLSWLLRLLN-T195 | | TCTCAGCAGCCAGCTCAGGCTGTCGCCGCCCAGGCTGCTGCTGGG | 412 |
| anti-hHER2-HC-P189G- | 110 | CTGAGCTGGCTGCTGAGACTGCTGAACCAGACCTACATCTGCAACGTGAAC | 413 |
| S190D-S191-S192L-L193S- | | TCTCAGCAGCCAGCTCAGGCTGTCGCCGGTGCCCAGGCTGCTGCTG | 414 |
| G194W-T195L-LRLLN- | | | |
| Q196 | | | |
| anti-hHER2-HC-Q196- | 180 | CTGAGCTGGCTGCTGAGACTGCTGAACACCTACATCTGCAACGTGAACCAC | 415 |
| GDSLSWLLRLLN-T197 | | TCTCAGCAGCCAGCTCAGGCTGTCGCCCTGGGTGCCCAGGCTGCTG | 416 |
| anti-hHER2-HC-K205- | 181 | CTGAGCTGGCTGCTGAGACTGCTGAACCCCAGCAACACCAAGGTGGAC | 417 |
| GDSLSWLLRLLN-P206 | | TCTCAGCAGCCAGCTCAGGCTGTCGCCCTTGTGGTTCACGTTGCAGATGTAG | 418 |
| | | G | |
| anti-hHER2-HC-P206- | 182 | CTGAGCTGGCTGCTGAGACTGCTGAACAGCAACACCAAGGTGGACAAGAAA | 419 |
| GDSLSWLLRLLN-S207 | | G | |
| | | TCTCAGCAGCCAGCTCAGGCTGTCGCCGGGCTTGTGGTTCACGTTGCAG | 420 |
| anti-hHER2-HC-S207- | 183 | CTGAGCTGGCTGCTGAGACTGCTGAACAACACCAAGGTGGACAAGAAAGTG | 421 |
| GDSLSWLLRLLN-N208 | | G | |
| | | TCTCAGCAGCCAGCTCAGGCTGTCGCCGCTGGGCTTGTGGTTCACGTTG | 422 |
| anti-hHER2-HC-P230- | 184 | CTGAGCTGGCTGCTGAGACTGCTGAACGCCCCAGAGCTGCTGGGC | 423 |
| GDSLSWLLRLLN-A231 | | TCTCAGCAGCCAGCTCAGGCTGTCGCCTGGGCAGGGGGGGCAGGTG | 424 |
| anti-hHER2-HC-A231- | 185 | CTGAGCTGGCTGCTGAGACTGCTGAACCCAGAGCTGCTGGGCGGAC | 425 |
| GDSLSWLLRLLN-P232 | | TCTCAGCAGCCAGCTCAGGCTGTCGCCGGCTGGGCAGGGGGGGC | 426 |
| anti-hHER2-HC-P232- | 186 | CTGAGCTGGCTGCTGAGACTGCTGAACGAGCTGCTGGGCGGACCC | 427 |
| GDSLSWLLRLLN-E233 | | TCTCAGCAGCCAGCTCAGGCTGTCGCCTGGGGCTGGGCAGGGGGG | 428 |
| anti-hHER2-HC-E233- | 187 | CTGAGCTGGCTGCTGAGACTGCTGAACCTGCTGGGCGGACCCTCC | 429 |
| GDSLSWLLRLLN-L234 | | TCTCAGCAGCCAGCTCAGGCTGTCGCCCTCTGGGGCTGGGCAGGG | 430 |
| anti-hHER2-HC-L234- | 188 | CTGAGCTGGCTGCTGAGACTGCTGAACCTGGGCGGACCCTCCGTG | 431 |
| GDSLSWLLRLLN-L235 | | TCTCAGCAGCCAGCTCAGGCTGTCGCCCAGCTCTGGGGCTGGGCAG | 432 |
| anti-hHER2-HC-L235- | 189 | CTGAGCTGGCTGCTGAGACTGCTGAACGGCGGACCCTCCGTGTTCC | 433 |
| GDSLSWLLRLLN-G236 | | TCTCAGCAGCCAGCTCAGGCTGTCGCCCAGCAGCTCTGGGGCTGGG | 434 |
| anti-hHER2-HC-G236- | 190 | CTGAGCTGGCTGCTGAGACTGCTGAACGGACCCTCCGTGTTCCTGTTCC | 435 |
| GDSLSWLLRLLN-G237 | | TCTCAGCAGCCAGCTCAGGCTGTCGCCGCCCAGCAGCTCTGGGGC | 436 |
| anti-hHER2-HC-P244- | 191 | CTGAGCTGGCTGCTGAGACTGCTGAACCCCAAGCCCAAGGACACCCTG | 437 |
| GDSLSWLLRLLN-P245 | | TCTCAGCAGCCAGCTCAGGCTGTCGCCGGGGAACAGGAACACGGAGGG | 438 |
| anti-hHER2-HC-P245- | 192 | CTGAGCTGGCTGCTGAGACTGCTGAACAAGCCCAAGGACACCCTGATGATC | 439 |
| GDSLSWLLRLLN-K246 | | TCTCAGCAGCCAGCTCAGGCTGTCGCCGGGGGGGAACAGGAACACGG | 440 |
| anti-hHER2-HC-1253- | 193 | CTGAGCTGGCTGCTGAGACTGCTGAACAGCAGGACCCCCGAGGTGAC | 441 |
| GDSLSWLLRLLN-S254 | | TCTCAGCAGCCAGCTCAGGCTGTCGCCGATCATCAGGGTGTCCTTGGGC | 442 |
| anti-hHER2-HC-S254- | 194 | CTGAGCTGGCTGCTGAGACTGCTGAACAGGACCCCCGAGGTGACCTG | 443 |
| GDSLSWLLRLLN-R255 | | TCTCAGCAGCCAGCTCAGGCTGTCGCCGCTGATCATCAGGGTGTCCTTGG | 444 |
| anti-hHER2-HC-R255- | 195 | CTGAGCTGGCTGCTGAGACTGCTGAACACCCCCGAGGTGACCTGCG | 445 |
| GDSLSWLLRLLN-T256 | | TCTCAGCAGCCAGCTCAGGCTGTCGCCCCTGCTGATCATCAGGGTGTCC | 446 |
| anti-hHER2-HC-T256- | 196 | CTGAGCTGGCTGCTGAGACTGCTGAACCCCGAGGTGACCTGCGTGG | 447 |
| GDSLSWLLRLLN-P257 | | TCTCAGCAGCCAGCTCAGGCTGTCGCCGGTCCTGCTGATCATCAGGGTG | 448 |
| anti-hHER2-HC-P257- | 197 | CTGAGCTGGCTGCTGAGACTGCTGAACGAGGTGACCTGCGTGGTGGTG | 449 |
| GDSLSWLLRLLN-E258 | | TCTCAGCAGCCAGCTCAGGCTGTCGCCGGGGGTCCTGCTGATCATCAG | 450 |
| anti-hHER2-HC-S267- | 198 | CTGAGCTGGCTGCTGAGACTGCTGAACCACGAGGACCCAGAGGTGAAGTTC | 451 |
| GDSLSWLLRLLN-H268 | | TCTCAGCAGCCAGCTCAGGCTGTCGCCGCTCACGTCCACCACCACGC | 452 |
| anti-hHER2-HC-H268- | 199 | CTGAGCTGGCTGCTGAGACTGCTGAACGAGGACCCAGAGGTGAAGTTCAAC | 453 |
| GDSLSWLLRLLN-E269 | | TCTCAGCAGCCAGCTCAGGCTGTCGCCGTGGCTCACGTCCACCACCAC | 454 |
| anti-hHER2-HC-E269- | 200 | CTGAGCTGGCTGCTGAGACTGCTGAACGACCCAGAGGTGAAGTTCAACTGG | 455 |
| GDSLSWLLRLLN-D270 | | TCTCAGCAGCCAGCTCAGGCTGTCGCCCTCGTGGCTCACGTCCACCAC | 456 |
| anti-hHER2-HC-D270- | 201 | CTGAGCTGGCTGCTGAGACTGCTGAACCCAGAGGTGAAGTTCAACTGGTAC | 457 |
| GDSLSWLLRLLN-P271 | | TCTCAGCAGCCAGCTCAGGCTGTCGCCGTCCTCGTGGCTCACGTCCAC | 458 |
| anti-hHER2-HC-P271- | 202 | CTGAGCTGGCTGCTGAGACTGCTGAACGAGGTGAAGTTCAACTGGTACGTG | 459 |
| GDSLSWLLRLLN-E272 | | G | |
| | | TCTCAGCAGCCAGCTCAGGCTGTCGCCTGGGTCCTCGTGGCTCACGTC | 460 |
| anti-hHER2-HC-D280- | 203 | CTGAGCTGGCTGCTGAGACTGCTGAACGGCGTGGAGGTGCACAACGC | 461 |
| GDSLSWLLRLLN-G281 | | TCTCAGCAGCCAGCTCAGGCTGTCGCCGTCCACGTACCAGTTGAACTTCACC | 462 |
| anti-hHER2-HC-H285- | 204 | CTGAGCTGGCTGCTGAGACTGCTGAACAACGCCAAGACCAAGCCCAGAG | 463 |
| GDSLSWLLRLLN-N286 | | TCTCAGCAGCCAGCTCAGGCTGTCGCCGTGCACCTCCACGCCGTCC | 464 |
| anti-hHER2-HC-N286- | 205 | CTGAGCTGGCTGCTGAGACTGCTGAACGCCAAGACCAAGCCCAGAGAG | 465 |
| GDSLSWLLRLLN-A287 | | TCTCAGCAGCCAGCTCAGGCTGTCGCCGTTGTGCACCTCCACGCCGTC | 466 |
| anti-hHER2-HC-P291- | 206 | CTGAGCTGGCTGCTGAGACTGCTGAACAGAGAGGAGCAGTACAACAGCACC | 467 |
| GDSLSWLLRLLN-R292 | | TCTCAGCAGCCAGCTCAGGCTGTCGCCGGGCTTGGTCTTGGCGTTGTG | 468 |
| anti-hHER2-HC-T307- | 207 | CTGAGCTGGCTGCTGAGACTGCTGAACGTGCTGCACCAGGACTGGCTG | 469 |
| GDSLSWLLRLLN-V308 | | TCTCAGCAGCCAGCTCAGGCTGTCGCCGGTCAGCACGGACACCACCC | 470 |
| anti-hHER2-HC-V308- | 208 | CTGAGCTGGCTGCTGAGACTGCTGAACCTGCACCAGGACTGGCTGAAC | 471 |
| GDSLSWLLRLLN-L309 | | TCTCAGCAGCCAGCTCAGGCTGTCGCCCACGGTCAGCACGGACACCAC | 472 |
| anti-hHER2-HC-L309- | 209 | CTGAGCTGGCTGCTGAGACTGCTGAACCACCAGGACTGGCTGAACGGC | 473 |
| GDSLSWLLRLLN-H310 | | TCTCAGCAGCCAGCTCAGGCTGTCGCCCAGCACGGTCAGCACGGACAC | 474 |
| anti-hHER2-HC-H310- | 210 | CTGAGCTGGCTGCTGAGACTGCTGAACCAGGACTGGCTGAACGGCAAG | 475 |
| GDSLSWLLRLLN-Q311 | | TCTCAGCAGCCAGCTCAGGCTGTCGCCGTGCAGCACGGTCAGCACGG | 476 |
| anti-hHER2-HC-N315- | 211 | CTGAGCTGGCTGCTGAGACTGCTGAACGGCAAGGAATACAAGTGCAAGGTC | 477 |
| GDSLSWLLRLLN-G316 | | TCTCAGCAGCCAGCTCAGGCTGTCGCCGTTCAGCCAGTCCTGGTGCAG | 478 |
| anti-hHER2-HC-G316- | 212 | CTGAGCTGGCTGCTGAGACTGCTGAACAAGGAATACAAGTGCAAGGTCTCCA | 479 |
| GDSLSWLLRLLN-K317 | | AC | |
| | | TCTCAGCAGCCAGCTCAGGCTGTCGCCGCCGTTCAGCCAGTCCTGGTG | 480 |
| anti-hHER2-HC-K317- | 213 | CTGAGCTGGCTGCTGAGACTGCTGAACGAATACAAGTGCAAGGTCTCCAACA | 481 |
| GDSLSWLLRLLN-E318 | | AG | |
| | | TCTCAGCAGCCAGCTCAGGCTGTCGCCCTTGCCGTTCAGCCAGTCCTG | 482 |
| anti-hHER2-HC-K326- | 214 | CTGAGCTGGCTGCTGAGACTGCTGAACGCCCTGCCAGCCCCCATC | 483 |
| GDSLSWLLRLLN-A327 | | TCTCAGCAGCCAGCTCAGGCTGTCGCCCTTGTTGGAGACCTTGCACTTGTATT | 484 |
| | | C | |
| anti-hHER2-HC-A327- | 215 | CTGAGCTGGCTGCTGAGACTGCTGAACCTGCCAGCCCCCATCGAAAAG | 485 |
| GDSLSWLLRLLN-L328 | | TCTCAGCAGCCAGCTCAGGCTGTCGCCGGCCTTGTTGGAGACCTTGCAC | 486 |
| anti-hHER2-HC-L328- | 216 | CTGAGCTGGCTGCTGAGACTGCTGAACCCAGCCCCCATCGAAAAGACC | 487 |
| GDSLSWLLRLLN-P329 | | TCTCAGCAGCCAGCTCAGGCTGTCGCCCAGGGCCTTGTTGGAGACCTTG | 488 |
| anti-hHER2-HC-P329- | 217 | CTGAGCTGGCTGCTGAGACTGCTGAACGCCCCCATCGAAAAGACCATCAG | 489 |
| GDSLSWLLRLLN-A330 | | TCTCAGCAGCCAGCTCAGGCTGTCGCCTGGCAGGGCCTTGTTGGAGAC | 490 |
| anti-hHER2-HC-A330- | 218 | CTGAGCTGGCTGCTGAGACTGCTGAACCCCATCGAAAAGACCATCAGCAAG | 491 |
| GDSLSWLLRLLN-P331 | | TCTCAGCAGCCAGCTCAGGCTGTCGCCGGCTGGCAGGGCCTTGTTGG | 492 |
| anti-hHER2-HC-A339- | 219 | CTGAGCTGGCTGCTGAGACTGCTGAACAAGGGCCAGCCACGGGAGC | 493 |
| GDSLSWLLRLLN-K340 | | TCTCAGCAGCCAGCTCAGGCTGTCGCCGGCCTTGCTGATGGTCTTTTCGATG | 494 |
| anti-hHER2-HC-K340- | 220 | CTGAGCTGGCTGCTGAGACTGCTGAACGGCCAGCCACGGGAGCCC | 495 |
| GDSLSWLLRLLN-G341 | | TCTCAGCAGCCAGCTCAGGCTGTCGCCCTTGGCCTTGCTGATGGTCTTTTC | 496 |
| anti-hHER2-HC-G341- | 221 | CTGAGCTGGCTGCTGAGACTGCTGAACCAGCCACGGGAGCCCCAG | 497 |
| GDSLSWLLRLLN-Q342 | | TCTCAGCAGCCAGCTCAGGCTGTCGCCGCCCTTGGCCTTGCTGATGGTC | 498 |
| anti-hHER2-HC-Q342- | 222 | CTGAGCTGGCTGCTGAGACTGCTGAACCCACGGGAGCCCCAGGTG | 499 |
| GDSLSWLLRLLN-P343 | | TCTCAGCAGCCAGCTCAGGCTGTCGCCCTGGCCCTTGGCCTTGCTGATG | 500 |
| anti-hHER2-HC-P343- | 223 | CTGAGCTGGCTGCTGAGACTGCTGAACCGGGAGCCCCAGGTGTACAC | 501 |
| GDSLSWLLRLLN-R344 | | TCTCAGCAGCCAGCTCAGGCTGTCGCCTGGCTGGCCCTTGGCCTTGC | 502 |
| anti-hHER2-HC-R344- | 224 | CTGAGCTGGCTGCTGAGACTGCTGAACGAGCCCCAGGTGTACACCCTG | 503 |
| GDSLSWLLRLLN-E345 | | TCTCAGCAGCCAGCTCAGGCTGTCGCCCCGTGGCTGGCCCTTGGC | 504 |
| anti-hHER2-HC-R355- | 225 | CTGAGCTGGCTGCTGAGACTGCTGAACGAGGAGATGACCAAGAACCAGGTG | 505 |
| GDSLSWLLRLLN-E356 | | TCTCAGCAGCCAGCTCAGGCTGTCGCCCCGGGAGGGGGGCAGGG | 506 |
| anti-hHER2-HC-E356- | 226 | CTGAGCTGGCTGCTGAGACTGCTGAACGAGATGACCAAGAACCAGGTGTCC | 507 |
| GDSLSWLLRLLN-E357 | | TCTCAGCAGCCAGCTCAGGCTGTCGCCCTCCCGGGAGGGGGGCAG | 508 |
| anti-hHER2-HC-E357- | 227 | CTGAGCTGGCTGCTGAGACTGCTGAACATGACCAAGAACCAGGTGTCCCTG | 509 |
| GDSLSWLLRLLN-M358 | | TCTCAGCAGCCAGCTCAGGCTGTCGCCCTCCTCCCGGGAGGGGGG | 510 |
| anti-hHER2-HC-M358- | 228 | CTGAGCTGGCTGCTGAGACTGCTGAACACCAAGAACCAGGTGTCCCTGAC | 511 |
| GDSLSWLLRLLN-T359 | | TCTCAGCAGCCAGCTCAGGCTGTCGCCCATCTCCTCCCGGGAGGGG | 512 |
| anti-hHER2-HC-T359- | 121 | CTGAGCTGGCTGCTGAGACTGCTGAACAAGAACCAGGTGTCCCTGACCTG | 513 |
| GDSLSWLLRLLN-K360 | | TCTCAGCAGCCAGCTCAGGCTGTCGCCGGTCATCTCCTCCCGGGAGG | 514 |
| anti-hHER2-HC-K360- | 229 | CTGAGCTGGCTGCTGAGACTGCTGAACAACCAGGTGTCCCTGACCTGTC | 515 |
| GDSLSWLLRLLN-N361 | | TCTCAGCAGCCAGCTCAGGCTGTCGCCCTTGGTCATCTCCTCCCGGGAG | 516 |
| anti-hHER2-HC-N384- | 230 | CTGAGCTGGCTGCTGAGACTGCTGAACGGCCAGCCCGAGAACAACTAC | 517 |
| GDSLSWLLRLLN-G385 | | TCTCAGCAGCCAGCTCAGGCTGTCGCCGTTGCTCTCCCACTCCACGGC | 518 |
| anti-hHER2-HC-E388- | 127 | CTGAGCTGGCTGCTGAGACTGCTGAACAACAACTACAAGACCACACCTCCAG | 519 |
| GDSLSWLLRLLN-N389 | | TCTCAGCAGCCAGCTCAGGCTGTCGCCCTCGGGCTGGCCGTTGCTC | 520 |
| anti-hHER2-HC-N389- | 231 | CTGAGCTGGCTGCTGAGACTGCTGAACAACTACAAGACCACACCTCCAGTGC | 521 |
| GDSLSWLLRLLN-N390 | | TCTCAGCAGCCAGCTCAGGCTGTCGCCGTTCTCGGGCTGGCCGTTGC | 522 |
| anti-hHER2-HC-T394- | 232 | CTGAGCTGGCTGCTGAGACTGCTGAACCCTCCAGTGCTGGACAGCGAC | 523 |
| GDSLSWLLRLLN-P395 | | TCTCAGCAGCCAGCTCAGGCTGTCGCCTGTGGTCTTGTAGTTGTTCTCGGGC | 524 |
| anti-hHER2-HC-P395- | 233 | CTGAGCTGGCTGCTGAGACTGCTGAACCCAGTGCTGGACAGCGACGG | 525 |
| GDSLSWLLRLLN-P396 | | TCTCAGCAGCCAGCTCAGGCTGTCGCCAGGTGTGGTCTTGTAGTTGTTCTCG | 526 |
| anti-hHER2-HC-D399- | 234 | CTGAGCTGGCTGCTGAGACTGCTGAACAGCGACGGCAGCTTCTTCCTG | 527 |
| GDSLSWLLRLLN-S400 | | TCTCAGCAGCCAGCTCAGGCTGTCGCCGTCCAGCACTGGAGGTGTGGTC | 528 |
| anti-hHER2-HC-5400- | 136 | CTGAGCTGGCTGCTGAGACTGCTGAACGACGGCAGCTTCTTCCTGTACAG | 529 |
| GDSLSWLLRLLN-D401 | | TCTCAGCAGCCAGCTCAGGCTGTCGCCGCTGTCCAGCACTGGAGGTGTG | 530 |
| anti-hHER2-HC-D401- | 235 | CTGAGCTGGCTGCTGAGACTGCTGAACGGCAGCTTCTTCCTGTACAGCAAG | 531 |
| GDSLSWLLRLLN-G402 | | TCTCAGCAGCCAGCTCAGGCTGTCGCCGTCGCTGTCCAGCACTGGAGG | 532 |
| anti-hHER2-HC-5415- | 236 | CTGAGCTGGCTGCTGAGACTGCTGAACAGGTGGCAGCAGGGCAACGTG | 533 |
| GDSLSWLLRLLN-R416 | | TCTCAGCAGCCAGCTCAGGCTGTCGCCGGACTTGTCCACGGTCAGCTTG | 534 |
| anti-hHER2-HC-R416- | 237 | CTGAGCTGGCTGCTGAGACTGCTGAACTGGCAGCAGGGCAACGTGTTC | 535 |
| GDSLSWLLRLLN-W417 | | TCTCAGCAGCCAGCTCAGGCTGTCGCCCCTGGACTTGTCCACGGTCAG | 536 |
| anti-hHER2-HC-W417- | 238 | CTGAGCTGGCTGCTGAGACTGCTGAACCAGCAGGGCAACGTGTTCAGC | 537 |
| GDSLSWLLRLLN-Q418 | | TCTCAGCAGCCAGCTCAGGCTGTCGCCCCACCTGGACTTGTCCACGGTC | 538 |
| anti-hHER2-HC-Q418- | 239 | CTGAGCTGGCTGCTGAGACTGCTGAACCAGGGCAACGTGTTCAGCTGC | 539 |
| GDSLSWLLRLLN-Q419 | | TCTCAGCAGCCAGCTCAGGCTGTCGCCCTGCCACCTGGACTTGTCCAC | 540 |
| anti-hHER2-HC-Q419- | 240 | CTGAGCTGGCTGCTGAGACTGCTGAACGGCAACGTGTTCAGCTGCAGC | 541 |
| GDSLSWLLRLLN-G420 | | TCTCAGCAGCCAGCTCAGGCTGTCGCCCTGCTGCCACCTGGACTTGTC | 542 |
| anti-hHER2-HC-G420- | 241 | CTGAGCTGGCTGCTGAGACTGCTGAACAACGTGTTCAGCTGCAGCGTGATG | 543 |
| GDSLSWLLRLLN-N421 | | TCTCAGCAGCCAGCTCAGGCTGTCGCCGCCCTGCTGCCACCTGGAC | 544 |
| anti-hHER2-HC-N421- | 242 | CTGAGCTGGCTGCTGAGACTGCTGAACGTGTTCAGCTGCAGCGTGATGC | 545 |
| GDSLSWLLRLLN-V422 | | TCTCAGCAGCCAGCTCAGGCTGTCGCCGTTGCCCTGCTGCCACCTGG | 546 |
| anti-hHER2-HC-H433- | 243 | CTGAGCTGGCTGCTGAGACTGCTGAACAACCACTACACCCAGAAGAGCCTG | 547 |
| GDSLSWLLRLLN-N434 | | TCTCAGCAGCCAGCTCAGGCTGTCGCCGTGCAGGGCCTCGTGCATCAC | 548 |
| anti-hHER2-HC-N434- | 244 | CTGAGCTGGCTGCTGAGACTGCTGAACCACTACACCCAGAAGAGCCTGAG | 549 |
| GDSLSWLLRLLN-H435 | | TCTCAGCAGCCAGCTCAGGCTGTCGCCGTTGTGCAGGGCCTCGTGCATC | 550 |
| anti-hHER2-HC-5442- | 245 | CTGAGCTGGCTGCTGAGACTGCTGAACCTGTCCCCCGGCAAGTAATCTAG | 551 |
| GDSLSWLLRLLN-L443 | | TCTCAGCAGCCAGCTCAGGCTGTCGCCGCTCAGGCTCTTCTGGGTGTAG | 552 |
| anti-hHER2-HC-L443- | 246 | CTGAGCTGGCTGCTGAGACTGCTGAACTCCCCCGGCAAGTAATCTAGACAC | 553 |
| GDSLSWLLRLLN-S444 | | TCTCAGCAGCCAGCTCAGGCTGTCGCCCAGGCTCAGGCTCTTCTGGGTG | 554 |
| anti-hHER2-HC-S444- | 247 | CTGAGCTGGCTGCTGAGACTGCTGAACCCCGGCAAGTAATCTAGACACCTC | 555 |
| GDSLSWLLRLLN-P445 | | TCTCAGCAGCCAGCTCAGGCTGTCGCCGGACAGGCTCAGGCTCTTCTG | 556 |
| anti-hHER2-HC-P445- | 248 | CTGAGCTGGCTGCTGAGACTGCTGAACGGCAAGTAATCTAGACACCTCAGAC | 557 |
| GDSLSWLLRLLN-G446 | | TCTCAGCAGCCAGCTCAGGCTGTCGCCGGGGGACAGGCTCAGGCTC | 558 |
| anti-hHER2-HC-G446- | 139 | CTGAGCTGGCTGCTGAGACTGCTGAACAAGTAATCTAGACACCTCAGACAAT | 559 |
| GDSLSWLLRLLN-K447 | | CAAC | |
| | | TCTCAGCAGCCAGCTCAGGCTGTCGCCGCCGGGGGACAGGCTCAG | 560 |
| anti-hHER2-HC-A118- | 249 | CTGGAGTTCATCGCCAGCAAGCTGGCCAGCACCAAGGGCCCCAGCG | 561 |
| DSLEFIASKLA-S119 | | CTTGCTGGCGATGAACTCCAGGCTGTCAGCCGAGGAGACGGTGACCAG | 562 |
| anti-hHER2-HC-S119- | 250 | CTGGAGTTCATCGCCAGCAAGCTGGCCACCAAGGGCCCCAGCGTGTTC | 563 |
| DSLEFIASKLA-T120 | | CTTGCTGGCGATGAACTCCAGGCTGTCGCTAGCCGAGGAGACGGTGAC | 564 |
| anti-hHER2-HC-T120- | 251 | CTGGAGTTCATCGCCAGCAAGCTGGCCAAGGGCCCCAGCGTGTTCCC | 565 |
| DSLEFIASKLA-K121 | | CTTGCTGGCGATGAACTCCAGGCTGTCGGTGCTAGCCGAGGAGACGG | 566 |
| anti-hHER2-HC-S131- | 252 | CTGGAGTTCATCGCCAGCAAGCTGGCCAGCAAGAGCACCAGCGGCGG | 567 |
| DSLEFIASKLA-S132 | | CTTGCTGGCGATGAACTCCAGGCTGTCGCTGGGGGCCAGGGGGAAC | 568 |
| anti-hHER2-HC-S132- | 253 | CTGGAGTTCATCGCCAGCAAGCTGGCCAAGAGCACCAGCGGCGGCAC | 569 |
| DSLEFIASKLA-K133 | | CTTGCTGGCGATGAACTCCAGGCTGTCGCTGCTGGGGGCCAGGGG | 570 |
| anti-hHER2-HC-K133- | 254 | CTGGAGTTCATCGCCAGCAAGCTGGCCAGCACCAGCGGCGGCACAG | 571 |
| DSLEFIASKLA-S134 | | CTTGCTGGCGATGAACTCCAGGCTGTCCTTGCTGCTGGGGGCCAGG | 572 |
| anti-hHER2-HC-S134- | 255 | CTGGAGTTCATCGCCAGCAAGCTGGCCACCAGCGGCGGCACAGCC | 573 |
| DSLEFIASKLA-T135 | | CTTGCTGGCGATGAACTCCAGGCTGTCGCTCTTGCTGCTGGGGGCC | 574 |
| anti-hHER2-HC-T135- | 256 | CTGGAGTTCATCGCCAGCAAGCTGGCCAGCGGCGGCACAGCCGCC | 575 |
| DSLEFIASKLA-S136 | | CTTGCTGGCGATGAACTCCAGGCTGTCGGTGCTCTTGCTGCTGGGGG | 576 |
| anti-hHER2-HC-S136- | 257 | CTGGAGTTCATCGCCAGCAAGCTGGCCGGCGGCACAGCCGCCCTG | 577 |
| DSLEFIASKLA-137 | | CTTGCTGGCGATGAACTCCAGGCTGTCGCTGGTGCTCTTGCTGCTGGG | 578 |
| anti-hHER2-HC-G137- | 258 | CTGGAGTTCATCGCCAGCAAGCTGGCCGGCACAGCCGCCCTGGGC | 579 |
| DSLEFIASKLA-G138 | | CTTGCTGGCGATGAACTCCAGGCTGTCGCCGCTGGTGCTCTTGCTGC | 580 |
| anti-hHER2-HC-G138- | 259 | CTGGAGTTCATCGCCAGCAAGCTGGCCACAGCCGCCCTGGGCTGC | 581 |
| DSLEFIASKLA-T139 | | CTTGCTGGCGATGAACTCCAGGCTGTCGCCGCCGCTGGTGCTCTTG | 582 |
| anti-hHER2-HC-E152- | 260 | CTGGAGTTCATCGCCAGCAAGCTGGCCCCCGTGACCGTGTCCTGGAAC | 583 |
| DSLEFIASKLA-P153 | | CTTGCTGGCGATGAACTCCAGGCTGTCCTCGGGGAAGTAGTCCTTCACC | 584 |
| anti-hHER2-HC-P153- | 261 | CTGGAGTTCATCGCCAGCAAGCTGGCCGTGACCGTGTCCTGGAACAGCG | 585 |
| DSLEFIASKLA-V154 | | CTTGCTGGCGATGAACTCCAGGCTGTCGGGCTCGGGGAAGTAGTCCTTC | 586 |
| anti-hHER2-HC-N159- | 262 | CTGGAGTTCATCGCCAGCAAGCTGGCCAGCGGAGCCCTGACCTCCG | 587 |
| DSLEFIASKLA-S160 | | CTTGCTGGCGATGAACTCCAGGCTGTCGTTCCAGGACACGGTCACGGG | 588 |
| anti-hHER2-HC-S160- | 263 | CTGGAGTTCATCGCCAGCAAGCTGGCCGGAGCCCTGACCTCCGGCGTGCAC | 589 |
| DSLEFIASKLA-G161 | | CTTGCTGGCGATGAACTCCAGGCTGTCGCTGTTCCAGGACACGGTCACG | 590 |
| anti-hHER2-HC-G161- | 264 | CTGGAGTTCATCGCCAGCAAGCTGGCCGCCCTGACCTCCGGCGTG | 591 |
| DSLEFIASKLA-A162 | | CTTGCTGGCGATGAACTCCAGGCTGTCTCCGCTGTTCCAGGACACGG | 592 |
| anti-hHER2-HC-A162- | 265 | CTGGAGTTCATCGCCAGCAAGCTGGCCCTGACCTCCGGCGTGCACAC | 593 |
| DSLEFIASKLA-L163 | | CTTGCTGGCGATGAACTCCAGGCTGTCGGCTCCGCTGTTCCAGGACAC | 594 |
| anti-hHER2-HC-L163- | 266 | CTGGAGTTCATCGCCAGCAAGCTGGCCACCTCCGGCGTGCACACCTTC | 595 |
| DSLEFIASKLA-T164 | | CTTGCTGGCGATGAACTCCAGGCTGTCCAGGGCTCCGCTGTTCCAGG | 596 |
| anti-hHER2-HC-T164- | 267 | CTGGAGTTCATCGCCAGCAAGCTGGCCTCCGGCGTGCACACCTTCCC | 597 |
| DSLEFIASKLA-S165 | | CTTGCTGGCGATGAACTCCAGGCTGTCGGTCAGGGCTCCGCTGTTCC | 598 |
| anti-hHER2-HC-S165- | 268 | CTGGAGTTCATCGCCAGCAAGCTGGCCGGCGTGCACACCTTCCCCG | 599 |
| DSLEFIASKLA-G166 | | CTTGCTGGCGATGAACTCCAGGCTGTCGGAGGTCAGGGCTCCGCTG | 600 |
| anti-hHER2-HC-P171- | 269 | CTGGAGTTCATCGCCAGCAAGCTGGCCGCCGTGCTGCAGAGCAGCG | 601 |
| DSLEFIASKLA-A172 | | CTTGCTGGCGATGAACTCCAGGCTGTCGGGGAAGGTGTGCACGCCG | 602 |
| anti-hHER2-HC-S176- | 270 | CTGGAGTTCATCGCCAGCAAGCTGGCCAGCGGCCTGTACAGCCTGTCC | 603 |
| DSLEFIASKLA-S177 | | CTTGCTGGCGATGAACTCCAGGCTGTCGCTCTGCAGCACGGCGGG | 604 |
| anti-hHER2-HC-S177- | 271 | CTGGAGTTCATCGCCAGCAAGCTGGCCGGCCTGTACAGCCTGTCCAGC | 605 |
| DSLEFIASKLA-G178 | | CTTGCTGGCGATGAACTCCAGGCTGTCGCTGCTCTGCAGCACGGCG | 606 |
| anti-hHER2-HC-P189- | 272 | CTGGAGTTCATCGCCAGCAAGCTGGCCAGCAGCAGCCTGGGCACCC | 607 |
| DSLEFIASKLA-S190 | | CTTGCTGGCGATGAACTCCAGGCTGTCGGGCACTGTCACCACGCTGG | 608 |
| anti-hHER2-HC-S190- | 273 | CTGGAGTTCATCGCCAGCAAGCTGGCCAGCAGCCTGGGCACCCAGAC | 609 |
| DSLEFIASKLA-S191 | | CTTGCTGGCGATGAACTCCAGGCTGTCGCTGGGCACTGTCACCACGC | 610 |
| anti-hHER2-HC-S191- | 274 | CTGGAGTTCATCGCCAGCAAGCTGGCCAGCCTGGGCACCCAGACCTAC | 611 |
| DSLEFIASKLA-S192 | | CTTGCTGGCGATGAACTCCAGGCTGTCGCTGCTGGGCACTGTCACCAC | 612 |
| anti-hHER2-HC-S192- | 275 | CTGGAGTTCATCGCCAGCAAGCTGGCCCTGGGCACCCAGACCTACATC | 613 |
| DSLEFIASKLA-L193 | | CTTGCTGGCGATGAACTCCAGGCTGTCGCTGCTGCTGGGCACTGTCAC | 614 |
| anti-hHER2-HC-L193- | 276 | CTGGAGTTCATCGCCAGCAAGCTGGCCGGCACCCAGACCTACATCTGC | 615 |
| DSLEFIASKLA-G194 | | CTTGCTGGCGATGAACTCCAGGCTGTCCAGGCTGCTGCTGGGCACTG | 616 |
| anti-hHER2-HC-G194- | 277 | CTGGAGTTCATCGCCAGCAAGCTGGCCACCCAGACCTACATCTGCAACGTG | 617 |
| DSLEFIASKLA-T195 | | CTTGCTGGCGATGAACTCCAGGCTGTCGCCCAGGCTGCTGCTGGG | 618 |
| anti-hHER2-HC-T195- | 278 | CTGGAGTTCATCGCCAGCAAGCTGGCCCAGACCTACATCTGCAACGTGAAC | 619 |
| DSLEFIASKLA-Q196 | | CTTGCTGGCGATGAACTCCAGGCTGTCGGTGCCCAGGCTGCTGCTG | 620 |
| anti-hHER2-HC-Q196- | 279 | CTGGAGTTCATCGCCAGCAAGCTGGCCACCTACATCTGCAACGTGAACCAC | 621 |
| DSLEFIASKLA-T197 | | CTTGCTGGCGATGAACTCCAGGCTGTCCTGGGTGCCCAGGCTGCTG | 622 |
| anti-hHER2-HC-K205- | 280 | CTGGAGTTCATCGCCAGCAAGCTGGCCCCCAGCAACACCAAGGTGGAC | 623 |
| DSLEFIASKLA-P206 | | CTTGCTGGCGATGAACTCCAGGCTGTCCTTGTGGTTCACGTTGCAGATGTAG | 624 |
| | | G | |
| anti-hHER2-HC-P206- | 281 | CTGGAGTTCATCGCCAGCAAGCTGGCCAGCAACACCAAGGTGGACAAGAAA | 625 |
| DSLEFIASKLA-S207 | | G | |
| | | CTTGCTGGCGATGAACTCCAGGCTGTCGGGCTTGTGGTTCACGTTGCAG | 626 |
| anti-hHER2-HC-S207- | 282 | CTGGAGTTCATCGCCAGCAAGCTGGCCAACACCAAGGTGGACAAGAAAGTG | 627 |
| DSLEFIASKLA-N208 | | G | |
| | | CTTGCTGGCGATGAACTCCAGGCTGTCGCTGGGCTTGTGGTTCACGTTG | 628 |
| anti-hHER2-HC-P230- | 283 | CTGGAGTTCATCGCCAGCAAGCTGGCCGCCCCAGAGCTGCTGGGC | 629 |
| DSLEFIASKLA-A231 | | CTTGCTGGCGATGAACTCCAGGCTGTCTGGGCAGGGGGGGCAGGTG | 630 |
| anti-hHER2-HC-A231- | 284 | CTGGAGTTCATCGCCAGCAAGCTGGCCCCAGAGCTGCTGGGCGGAC | 631 |
| DSLEFIASKLA-P232 | | CTTGCTGGCGATGAACTCCAGGCTGTCGGCTGGGCAGGGGGGGC | 632 |
| anti-hHER2-HC-P232- | 285 | CTGGAGTTCATCGCCAGCAAGCTGGCCGAGCTGCTGGGCGGACCC | 633 |
| DSLEFIASKLA-E233 | | CTTGCTGGCGATGAACTCCAGGCTGTCTGGGGCTGGGCAGGGGGG | 634 |
| anti-hHER2-HC-E233- | 286 | CTGGAGTTCATCGCCAGCAAGCTGGCCCTGCTGGGCGGACCCTCC | 635 |
| DSLEFIASKLA-L234 | | CTTGCTGGCGATGAACTCCAGGCTGTCCTCTGGGGCTGGGCAGGG | 636 |
| anti-hHER2-HC-L234- | 287 | CTGGAGTTCATCGCCAGCAAGCTGGCCCTGGGCGGACCCTCCGTG | 637 |
| DSLEFIASKLA-L235 | | CTTGCTGGCGATGAACTCCAGGCTGTCCAGCTCTGGGGCTGGGCAG | 638 |
| anti-hHER2-HC-L235- | 288 | CTGGAGTTCATCGCCAGCAAGCTGGCCGGCGGACCCTCCGTGTTCC | 639 |
| DSLEFIASKLA-G236 | | CTTGCTGGCGATGAACTCCAGGCTGTCCAGCAGCTCTGGGGCTGGG | 640 |
| anti-hHER2-HC-G236- | 289 | CTGGAGTTCATCGCCAGCAAGCTGGCCGGACCCTCCGTGTTCCTGTTCC | 641 |
| DSLEFIASKLA-G237 | | CTTGCTGGCGATGAACTCCAGGCTGTCGCCCAGCAGCTCTGGGGC | 642 |
| anti-hHER2-HC-P244- | 290 | CTGGAGTTCATCGCCAGCAAGCTGGCCCCCAAGCCCAAGGACACCCTG | 643 |
| DSLEFIASKLA-P245 | | CTTGCTGGCGATGAACTCCAGGCTGTCGGGGAACAGGAACACGGAGGG | 644 |
| anti-hHER2-HC-P245- | 291 | CTGGAGTTCATCGCCAGCAAGCTGGCCAAGCCCAAGGACACCCTGATGATC | 645 |
| DSLEFIASKLA-K246 | | CTTGCTGGCGATGAACTCCAGGCTGTCGGGGGGGAACAGGAACACGG | 646 |
| anti-hHER2-HC-I253- | 292 | CTGGAGTTCATCGCCAGCAAGCTGGCCAGCAGGACCCCCGAGGTGAC | 647 |
| DSLEFIASKLA-S254 | | CTTGCTGGCGATGAACTCCAGGCTGTCGATCATCAGGGTGTCCTTGGGC | 648 |
| anti-hHER2-HC-S254- | 293 | CTGGAGTTCATCGCCAGCAAGCTGGCCAGGACCCCCGAGGTGACCTG | 649 |
| DSLEFIASKLA-R255 | | CTTGCTGGCGATGAACTCCAGGCTGTCGCTGATCATCAGGGTGTCCTTGG | 650 |
| anti-hHER2-HC-R255- | 294 | CTGGAGTTCATCGCCAGCAAGCTGGCCACCCCCGAGGTGACCTGCG | 651 |
| DSLEFIASKLA-T256 | | CTTGCTGGCGATGAACTCCAGGCTGTCCCTGCTGATCATCAGGGTGTCC | 652 |
| anti-hHER2-HC-T256- | 295 | CTGGAGTTCATCGCCAGCAAGCTGGCCCCCGAGGTGACCTGCGTGG | 653 |
| DSLEFIASKLA-P257 | | CTTGCTGGCGATGAACTCCAGGCTGTCGGTCCTGCTGATCATCAGGGTG | 654 |
| anti-hHER2-HC-P257- | 296 | CTGGAGTTCATCGCCAGCAAGCTGGCCGAGGTGACCTGCGTGGTGGTG | 655 |
| DSLEFIASKLA-E258 | | CTTGCTGGCGATGAACTCCAGGCTGTCGGGGGTCCTGCTGATCATCAG | 656 |
| anti-hHER2-HC-S267- | 297 | CTGGAGTTCATCGCCAGCAAGCTGGCCCACGAGGACCCAGAGGTGAAGTTC | 657 |
| DSLEFIASKLA-H268 | | CTTGCTGGCGATGAACTCCAGGCTGTCGCTCACGTCCACCACCACGC | 658 |
| anti-hHER2-HC-H268- | 298 | CTGGAGTTCATCGCCAGCAAGCTGGCCGAGGACCCAGAGGTGAAGTTCAAC | 659 |
| DSLEFIASKLA-E269 | | CTTGCTGGCGATGAACTCCAGGCTGTCGTGGCTCACGTCCACCACCAC | 660 |
| anti-hHER2-HC-E269- | 299 | CTGGAGTTCATCGCCAGCAAGCTGGCCGACCCAGAGGTGAAGTTCAACTGG | 661 |
| DSLEFIASKLA-D270 | | CTTGCTGGCGATGAACTCCAGGCTGTCCTCGTGGCTCACGTCCACCAC | 662 |
| anti-hHER2-HC-D270- | 300 | CTGGAGTTCATCGCCAGCAAGCTGGCCCCAGAGGTGAAGTTCAACTGGTAC | 663 |
| DSLEFIASKLA-P271 | | CTTGCTGGCGATGAACTCCAGGCTGTCGTCCTCGTGGCTCACGTCCAC | 664 |
| anti-hHER2-HC-P271- | 301 | CTGGAGTTCATCGCCAGCAAGCTGGCCGAGGTGAAGTTCAACTGGTACGTGG | 665 |
| DSLEFIASKLA-E272 | | CTTGCTGGCGATGAACTCCAGGCTGTCTGGGTCCTCGTGGCTCACGTC | 666 |
| anti-hHER2-HC-D280- | 302 | CTGGAGTTCATCGCCAGCAAGCTGGCCGGCGTGGAGGTGCACAACGC | 667 |
| DSLEFIASKLA-G281 | | CTTGCTGGCGATGAACTCCAGGCTGTCGTCCACGTACCAGTTGAACTTCACC | 668 |
| anti-hHER2-HC-H285- | 303 | CTGGAGTTCATCGCCAGCAAGCTGGCCAACGCCAAGACCAAGCCCAGAG | 669 |
| DSLEFIASKLA-N286 | | CTTGCTGGCGATGAACTCCAGGCTGTCGTGCACCTCCACGCCGTCC | 670 |
| anti-hHER2-HC-N286- | 304 | CTGGAGTTCATCGCCAGCAAGCTGGCCGCCAAGACCAAGCCCAGAGAG | 671 |
| DSLEFIASKLA-A287 | | CTTGCTGGCGATGAACTCCAGGCTGTCGTTGTGCACCTCCACGCCGTC | 672 |
| anti-hHER2-HC-P291- | 305 | CTGGAGTTCATCGCCAGCAAGCTGGCCAGAGAGGAGCAGTACAACAGCACC | 673 |
| DSLEFIASKLA-R292 | | CTTGCTGGCGATGAACTCCAGGCTGTCGGGCTTGGTCTTGGCGTTGTG | 674 |
| anti-hHER2-HC-T307- | 306 | CTGGAGTTCATCGCCAGCAAGCTGGCCGTGCTGCACCAGGACTGGCTG | 675 |
| DSLEFIASKLA-V308 | | CTTGCTGGCGATGAACTCCAGGCTGTCGGTCAGCACGGACACCACCC | 676 |
| anti-hHER2-HC-V308- | 307 | CTGGAGTTCATCGCCAGCAAGCTGGCCCTGCACCAGGACTGGCTGAAC | 677 |
| DSLEFIASKLA-L309 | | CTTGCTGGCGATGAACTCCAGGCTGTCCACGGTCAGCACGGACACCAC | 678 |
| anti-hHER2-HC-L309- | 308 | CTGGAGTTCATCGCCAGCAAGCTGGCCCACCAGGACTGGCTGAACGGC | 679 |
| DSLEFIASKLA-H310 | | CTTGCTGGCGATGAACTCCAGGCTGTCCAGCACGGTCAGCACGGACAC | 680 |
| anti-hHER2-HC-H310- | 309 | CTGGAGTTCATCGCCAGCAAGCTGGCCCAGGACTGGCTGAACGGCAAG | 681 |
| DSLEFIASKLA-Q311 | | CTTGCTGGCGATGAACTCCAGGCTGTCGTGCAGCACGGTCAGCACGG | 682 |
| anti-hHER2-HC-N315- | 310 | CTGGAGTTCATCGCCAGCAAGCTGGCCGGCAAGGAATACAAGTGCAAGGTC | 683 |
| DSLEFIASKLA-G316 | | CTTGCTGGCGATGAACTCCAGGCTGTCGTTCAGCCAGTCCTGGTGCAG | 684 |
| anti-hHER2-HC-G316- | 311 | CTGGAGTTCATCGCCAGCAAGCTGGCCAAGGAATACAAGTGCAAGGTCTCCA | 685 |
| DSLEFIASKLA-K317 | | AC | |
| | | CTTGCTGGCGATGAACTCCAGGCTGTCGCCGTTCAGCCAGTCCTGGTG | 686 |
| anti-hHER2-HC-K317- | 312 | CTGGAGTTCATCGCCAGCAAGCTGGCCGAATACAAGTGCAAGGTCTCCAACA | 687 |
| DSLEFIASKLA-E318 | | AG | |
| | | CTTGCTGGCGATGAACTCCAGGCTGTCCTTGCCGTTCAGCCAGTCCTG | 688 |
| anti-hHER2-HC-K326- | 313 | CTGGAGTTCATCGCCAGCAAGCTGGCCGCCCTGCCAGCCCCCATC | 689 |
| DSLEFIASKLA-A327 | | CTTGCTGGCGATGAACTCCAGGCTGTCCTTGTTGGAGACCTTGCACTTGTATT | 690 |
| | | C | |
| anti-hHER2-HC-A327- | 314 | CTGGAGTTCATCGCCAGCAAGCTGGCCCTGCCAGCCCCCATCGAAAAG | 691 |
| DSLEFIASKLA-L328 | | CTTGCTGGCGATGAACTCCAGGCTGTCGGCCTTGTTGGAGACCTTGCAC | 692 |
| anti-hHER2-HC-L328- | 315 | CTGGAGTTCATCGCCAGCAAGCTGGCCCCAGCCCCCATCGAAAAGACC | 693 |
| DSLEFIASKLA-P329 | | CTTGCTGGCGATGAACTCCAGGCTGTCCAGGGCCTTGTTGGAGACCTTG | 694 |
| anti-hHER2-HC-P329- | 316 | CTGGAGTTCATCGCCAGCAAGCTGGCCGCCCCCATCGAAAAGACCATCAG | 695 |
| DSLEFIASKLA-A330 | | CTTGCTGGCGATGAACTCCAGGCTGTCTGGCAGGGCCTTGTTGGAGAC | 696 |
| anti-hHER2-HC-A330- | 317 | CTGGAGTTCATCGCCAGCAAGCTGGCCCCCATCGAAAAGACCATCAGCAAG | 697 |
| DSLEFIASKLA-P331 | | CTTGCTGGCGATGAACTCCAGGCTGTCGGCTGGCAGGGCCTTGTTGG | 698 |
| anti-hHER2-HC-A339- | 318 | CTGGAGTTCATCGCCAGCAAGCTGGCCAAGGGCCAGCCACGGGAGC | 699 |
| DSLEFIASKLA-K340 | | CTTGCTGGCGATGAACTCCAGGCTGTCGGCCTTGCTGATGGTCTTTTCGATG | 700 |
| anti-hHER2-HC-K340- | 319 | CTGGAGTTCATCGCCAGCAAGCTGGCCGGCCAGCCACGGGAGCCC | 701 |
| DSLEFIASKLA-G341 | | CTTGCTGGCGATGAACTCCAGGCTGTCCTTGGCCTTGCTGATGGTCTTTTC | 702 |
| anti-hHER2-HC-G341- | 320 | CTGGAGTTCATCGCCAGCAAGCTGGCCCAGCCACGGGAGCCCCAG | 703 |
| DSLEFIASKLA-Q342 | | CTTGCTGGCGATGAACTCCAGGCTGTCGCCCTTGGCCTTGCTGATGGTC | 704 |
| anti-hHER2-HC-Q342- | 321 | CTGGAGTTCATCGCCAGCAAGCTGGCCCCACGGGAGCCCCAGGTG | 705 |
| DSLEFIASKLA-P343 | | CTTGCTGGCGATGAACTCCAGGCTGTCCTGGCCCTTGGCCTTGCTGATG | 706 |
| anti-hHER2-HC-P343- | 322 | CTGGAGTTCATCGCCAGCAAGCTGGCCCGGGAGCCCCAGGTGTACAC | 707 |
| DSLEFIASKLA-R344 | | CTTGCTGGCGATGAACTCCAGGCTGTCTGGCTGGCCCTTGGCCTTGC | 708 |
| anti-hHER2-HC-R344- | 323 | CTGGAGTTCATCGCCAGCAAGCTGGCCGAGCCCCAGGTGTACACCCTG | 709 |
| DSLEFIASKLA-E345 | | CTTGCTGGCGATGAACTCCAGGCTGTCCCGTGGCTGGCCCTTGGC | 710 |
| anti-hHER2-HC-R355- | 324 | CTGGAGTTCATCGCCAGCAAGCTGGCCGAGGAGATGACCAAGAACCAGGTG | 711 |
| DSLEFIASKLA-E356 | | CTTGCTGGCGATGAACTCCAGGCTGTCCCGGGAGGGGGGCAGGG | 712 |
| anti-hHER2-HC-E356- | 325 | CTGGAGTTCATCGCCAGCAAGCTGGCCGAGATGACCAAGAACCAGGTGTCC | 713 |
| DSLEFIASKLA-E357 | | CTTGCTGGCGATGAACTCCAGGCTGTCCTCCCGGGAGGGGGGCAG | 714 |
| anti-hHER2-HC-E357- | 326 | CTGGAGTTCATCGCCAGCAAGCTGGCCATGACCAAGAACCAGGTGTCCCTG | 715 |
| DSLEFIASKLA-M358 | | CTTGCTGGCGATGAACTCCAGGCTGTCCTCCTCCCGGGAGGGGGG | 716 |
| anti-hHER2-HC-M358- | 327 | CTGGAGTTCATCGCCAGCAAGCTGGCCACCAAGAACCAGGTGTCCCTGAC | 717 |
| DSLEFIASKLA-T359 | | CTTGCTGGCGATGAACTCCAGGCTGTCCATCTCCTCCCGGGAGGGG | 718 |
| anti-hHER2-HC-T359- | 122 | CTGGAGTTCATCGCCAGCAAGCTGGCCAAGAACCAGGTGTCCCTGACCTG | 719 |
| DSLEFIASKLA-K360 | | CTTGCTGGCGATGAACTCCAGGCTGTCGGTCATCTCCTCCCGGGAGG | 720 |
| anti-hHER2-HC-K360- | 328 | CTGGAGTTCATCGCCAGCAAGCTGGCCAACCAGGTGTCCCTGACCTGTC | 721 |
| DSLEFIASKLA-N361 | | CTTGCTGGCGATGAACTCCAGGCTGTCCTTGGTCATCTCCTCCCGGGAG | 722 |
| anti-hHER2-HC-N384- | 329 | CTGGAGTTCATCGCCAGCAAGCTGGCCGGCCAGCCCGAGAACAACTAC | 723 |
| DSLEFIASKLA-G385 | | CTTGCTGGCGATGAACTCCAGGCTGTCGTTGCTCTCCCACTCCACGGC | 724 |
| anti-hHER2-HC-E388- | 129 | CTGGAGTTCATCGCCAGCAAGCTGGCCAACAACTACAAGACCACACCTCCAG | 725 |
| DSLEFIASKLA-N389 | | CTTGCTGGCGATGAACTCCAGGCTGTCCTCGGGCTGGCCGTTGCTC | 726 |
| anti-hHER2-HC-N389- | 330 | CTGGAGTTCATCGCCAGCAAGCTGGCCAACTACAAGACCACACCTCCAGTGC | 727 |
| DSLEFIASKLA-N390 | | CTTGCTGGCGATGAACTCCAGGCTGTCGTTCTCGGGCTGGCCGTTGC | 728 |
| anti-hHER2-HC-T394- | 331 | CTGGAGTTCATCGCCAGCAAGCTGGCCCCTCCAGTGCTGGACAGCGAC | 729 |
| DSLEFIASKLA-P395 | | CTTGCTGGCGATGAACTCCAGGCTGTCTGTGGTCTTGTAGTTGTTCTCGGGC | 730 |
| anti-hHER2-HC-P395- | 332 | CTGGAGTTCATCGCCAGCAAGCTGGCCCCAGTGCTGGACAGCGACGG | 731 |
| DSLEFIASKLA-P396 | | CTTGCTGGCGATGAACTCCAGGCTGTCAGGTGTGGTCTTGTAGTTGTTCTCG | 732 |
| anti-hHER2-HC-D399- | 333 | CTGGAGTTCATCGCCAGCAAGCTGGCCAGCGACGGCAGCTTCTTCCTG | 733 |
| DSLEFIASKLA-S400 | | CTTGCTGGCGATGAACTCCAGGCTGTCGTCCAGCACTGGAGGTGTGGTC | 734 |
| anti-hHER2-HC-S400- | 334 | CTGGAGTTCATCGCCAGCAAGCTGGCCGACGGCAGCTTCTTCCTGTACAG | 735 |
| DSLEFIASKLA-D401 | | CTTGCTGGCGATGAACTCCAGGCTGTCGCTGTCCAGCACTGGAGGTGTG | 736 |
| anti-hHER2-HC-D401- | 335 | CTGGAGTTCATCGCCAGCAAGCTGGCCGGCAGCTTCTTCCTGTACAGCAAG | 737 |
| DSLEFIASKLA-G402 | | CTTGCTGGCGATGAACTCCAGGCTGTCGTCGCTGTCCAGCACTGGAGG | 738 |
| anti-hHER2-HC-S415- | 336 | CTGGAGTTCATCGCCAGCAAGCTGGCCAGGTGGCAGCAGGGCAACGTG | 739 |
| DSLEFIASKLA-R416 | | CTTGCTGGCGATGAACTCCAGGCTGTCGGACTTGTCCACGGTCAGCTTG | 740 |
| anti-hHER2-HC-R416- | 337 | CTGGAGTTCATCGCCAGCAAGCTGGCCTGGCAGCAGGGCAACGTGTTC | 741 |
| DSLEFIASKLA-W417 | | CTTGCTGGCGATGAACTCCAGGCTGTCCCTGGACTTGTCCACGGTCAG | 742 |
| anti-hHER2-HC-W417- | 338 | CTGGAGTTCATCGCCAGCAAGCTGGCCCAGCAGGGCAACGTGTTCAGC | 743 |
| DSLEFIASKLA-Q418 | | CTTGCTGGCGATGAACTCCAGGCTGTCCCACCTGGACTTGTCCACGGTC | 744 |
| anti-hHER2-HC-Q418- | 339 | CTGGAGTTCATCGCCAGCAAGCTGGCCCAGGGCAACGTGTTCAGCTGC | 745 |
| DSLEFIASKLA-Q419 | | CTTGCTGGCGATGAACTCCAGGCTGTCCTGCCACCTGGACTTGTCCAC | 746 |
| anti-hHER2-HC-Q419- | 340 | CTGGAGTTCATCGCCAGCAAGCTGGCCGGCAACGTGTTCAGCTGCAGC | 747 |
| DSLEFIASKLA-G420 | | CTTGCTGGCGATGAACTCCAGGCTGTCCTGCTGCCACCTGGACTTGTC | 748 |
| anti-hHER2-HC-G420- | 341 | CTGGAGTTCATCGCCAGCAAGCTGGCCAACGTGTTCAGCTGCAGCGTGATG | 749 |
| DSLEFIASKLA-N421 | | CTTGCTGGCGATGAACTCCAGGCTGTCGCCCTGCTGCCACCTGGAC | 750 |
| anti-hHER2-HC-N421- | 342 | CTGGAGTTCATCGCCAGCAAGCTGGCCGTGTTCAGCTGCAGCGTGATGC | 751 |
| DSLEFIASKLA-V422 | | CTTGCTGGCGATGAACTCCAGGCTGTCGTTGCCCTGCTGCCACCTGG | 752 |
| anti-hHER2-HC-H433- | 343 | CTGGAGTTCATCGCCAGCAAGCTGGCCAACCACTACACCCAGAAGAGCCTG | 753 |
| DSLEFIASKLA-N434 | | CTTGCTGGCGATGAACTCCAGGCTGTCGTGCAGGGCCTCGTGCATCAC | 754 |
| anti-hHER2-HC-N434- | 344 | CTGGAGTTCATCGCCAGCAAGCTGGCCCACTACACCCAGAAGAGCCTGAG | 755 |
| DSLEFIASKLA-H435 | | CTTGCTGGCGATGAACTCCAGGCTGTCGTTGTGCAGGGCCTCGTGCATC | 756 |
| anti-hHER2-HC-S442- | 345 | CTGGAGTTCATCGCCAGCAAGCTGGCCCTGTCCCCCGGCAAGTAATCTAG | 757 |
| DSLEFIASKLA-L443 | | CTTGCTGGCGATGAACTCCAGGCTGTCGCTCAGGCTCTTCTGGGTGTAG | 758 |
| anti-hHER2-HC-L443- | 346 | CTGGAGTTCATCGCCAGCAAGCTGGCCTCCCCCGGCAAGTAATCTAGACAC | 759 |
| DSLEFIASKLA-S444 | | CTTGCTGGCGATGAACTCCAGGCTGTCCAGGCTCAGGCTCTTCTGGGTG | 760 |
| anti-hHER2-HC-S444- | 347 | CTGGAGTTCATCGCCAGCAAGCTGGCCCCCGGCAAGTAATCTAGACACCTC | 761 |
| DSLEFIASKLA-P445 | | CTTGCTGGCGATGAACTCCAGGCTGTCGGACAGGCTCAGGCTCTTCTG | 762 |
| anti-hHER2-HC-P445- | 348 | CTGGAGTTCATCGCCAGCAAGCTGGCCGGCAAGTAATCTAGACACCTCAGAC | 763 |
| DSLEFIASKLA-G446 | | CTTGCTGGCGATGAACTCCAGGCTGTCGGGGGACAGGCTCAGGCTC | 764 |
| anti-hHER2-HC-G446- | 349 | CTGGAGTTCATCGCCAGCAAGCTGGCCAAGTAATCTAGACACCTCAGACAAT | 765 |
| DSLEFIASKLA-K447 | | CAAC | |
| | | CTTGCTGGCGATGAACTCCAGGCTGTCGCCGGGGGACAGGCTCAG | 766 |
| anti-hHER2-LC-T109- | 31 | CTGAGCTGGCTGCTGAGACTGCTGAACGTGGCCGCTCCCAGCGTG | 767 |
| GDSLSWLLRLLN-V110 | | TCTCAGCAGCCAGCTCAGGCTGTCGCCCGTTCGTTTGATCTCCACCTTGGT | 768 |
| anti-hHER2-LC-V110- | 32 | CTGAGCTGGCTGCTGAGACTGCTGAACGCCGCTCCCAGCGTGTTCATC | 769 |
| GDSLSWLLRLLN-A111 | | TCTCAGCAGCCAGCTCAGGCTGTCGCCCACCGTTCGTTTGATCTCCACCTTG | 770 |
| anti-hHER2-LC-A111- | 33 | CTGAGCTGGCTGCTGAGACTGCTGAACGCTCCCAGCGTGTTCATCTTCC | 771 |
| GDSLSWLLRLLN-A112 | | TCTCAGCAGCCAGCTCAGGCTGTCGCCGGCCACCGTTCGTTTGATCTCC | 772 |
| anti-hHER2-LC-P119- | 34 | CTGAGCTGGCTGCTGAGACTGCTGAACCCCAGCGACGAGCAGCTGAAG | 773 |
| GDSLSWLLRLLN-P120 | | TCTCAGCAGCCAGCTCAGGCTGTCGCCGGGGAAGATGAACACGCTGGG | 774 |
| anti-hHER2-LC-P120- | 35 | CTGAGCTGGCTGCTGAGACTGCTGAACAGCGACGAGCAGCTGAAGAGC | 775 |
| GDSLSWLLRLLN-S121 | | TCTCAGCAGCCAGCTCAGGCTGTCGCCGGGGGGGAAGATGAACACGCTG | 776 |
| anti-hHER2-LC-S121- | 36 | CTGAGCTGGCTGCTGAGACTGCTGAACGACGAGCAGCTGAAGAGCGGC | 777 |
| GDSLSWLLRLLN-D122 | | TCTCAGCAGCCAGCTCAGGCTGTCGCCGCTGGGGGGGAAGATGAACAC | 778 |
| anti-hHER2-LC-D122- | 37 | CTGAGCTGGCTGCTGAGACTGCTGAACGAGCAGCTGAAGAGCGGCACC | 779 |
| GDSLSWLLRLLN-E123 | | TCTCAGCAGCCAGCTCAGGCTGTCGCCGTCGCTGGGGGGGAAGATGAAC | 780 |
| anti-hHER2-LC-Y140- | 38 | CTGAGCTGGCTGCTGAGACTGCTGAACCCCCGGGAGGCCAAGGTG | 781 |
| GDSLSWLLRLLN-P141 | | TCTCAGCAGCCAGCTCAGGCTGTCGCCGTAGAAGTTGTTCAGCAGGCACAC | 782 |
| anti-hHER2-LC-P141- | 39 | CTGAGCTGGCTGCTGAGACTGCTGAACCGGGAGGCCAAGGTGCAGTG | 783 |
| GDSLSWLLRLLN-R142 | | TCTCAGCAGCCAGCTCAGGCTGTCGCCGGGGTAGAAGTTGTTCAGCAGGC | 784 |
| anti-hHER2-LC-R142- | 40 | CTGAGCTGGCTGCTGAGACTGCTGAACGAGGCCAAGGTGCAGTGGAAG | 785 |
| GDSLSWLLRLLN-E143 | | TCTCAGCAGCCAGCTCAGGCTGTCGCCCCGGGGGTAGAAGTTGTTCAGC | 786 |
| anti-hHER2-LC-E143- | 41 | CTGAGCTGGCTGCTGAGACTGCTGAACGCCAAGGTGCAGTGGAAGGTG | 787 |
| GDSLSWLLRLLN-A144 | | TCTCAGCAGCCAGCTCAGGCTGTCGCCCTCCCGGGGGTAGAAGTTGTTC | 788 |
| anti-hHER2-LC-D151- | 42 | CTGAGCTGGCTGCTGAGACTGCTGAACAACGCCCTGCAGAGCGGCAAC | 789 |
| GDSLSWLLRLLN-N152 | | TCTCAGCAGCCAGCTCAGGCTGTCGCCGTCCACCTTCCACTGCACCTTG | 790 |
| anti-hHER2-LC-N152- | 43 | CTGAGCTGGCTGCTGAGACTGCTGAACGCCCTGCAGAGCGGCAACAG | 791 |
| GDSLSWLLRLLN-A153 | | TCTCAGCAGCCAGCTCAGGCTGTCGCCGTTGTCCACCTTCCACTGCACC | 792 |
| anti-hHER2-LC-A153- | 44 | CTGAGCTGGCTGCTGAGACTGCTGAACCTGCAGAGCGGCAACAGCCAG | 793 |
| GDSLSWLLRLLN-L154 | | TCTCAGCAGCCAGCTCAGGCTGTCGCCGGCGTTGTCCACCTTCCACTG | 794 |
| anti-hHER2-LC-L154- | 45 | CTGAGCTGGCTGCTGAGACTGCTGAACCAGAGCGGCAACAGCCAGGAG | 795 |
| GDSLSWLLRLLN-Q155 | | TCTCAGCAGCCAGCTCAGGCTGTCGCCCAGGGCGTTGTCCACCTTCCAC | 796 |
| anti-hHER2-LC-Q155- | 46 | CTGAGCTGGCTGCTGAGACTGCTGAACAGCGGCAACAGCCAGGAGAGC | 797 |
| GDSLSWLLRLLN-S156 | | TCTCAGCAGCCAGCTCAGGCTGTCGCCCTGCAGGGCGTTGTCCACCTTC | 798 |
| anti-hHER2-LC-E161- | 47 | CTGAGCTGGCTGCTGAGACTGCTGAACAGCGTCACCGAGCAGGACAGC | 799 |
| GDSLSWLLRLLN-S162 | | TCTCAGCAGCCAGCTCAGGCTGTCGCCCTCCTGGCTGTTGCCGCTCTG | 800 |
| anti-hHER2-LC-S162- | 48 | CTGAGCTGGCTGCTGAGACTGCTGAACGTCACCGAGCAGGACAGCAAG | 801 |
| GDSLSWLLRLLN-V163 | | TCTCAGCAGCCAGCTCAGGCTGTCGCCGCTCTCCTGGCTGTTGCCGC | 802 |
| anti-hHER2-LC-V163- | 49 | CTGAGCTGGCTGCTGAGACTGCTGAACACCGAGCAGGACAGCAAGGAC | 803 |
| GDSLSWLLRLLN-T164 | | TCTCAGCAGCCAGCTCAGGCTGTCGCCGACGCTCTCCTGGCTGTTGCC | 804 |
| anti-hHER2-LC-T164- | 50 | CTGAGCTGGCTGCTGAGACTGCTGAACGAGCAGGACAGCAAGGACTCC | 805 |
| GDSLSWLLRLLN-E165 | | TCTCAGCAGCCAGCTCAGGCTGTCGCCGGTGACGCTCTCCTGGCTGTTG | 806 |
| anti-hHER2-LC-E165- | 51 | CTGAGCTGGCTGCTGAGACTGCTGAACCAGGACAGCAAGGACTCCACC | 807 |
| GDSLSWLLRLLN-Q166 | | TCTCAGCAGCCAGCTCAGGCTGTCGCCCTCGGTGACGCTCTCCTGGC | 808 |
| anti-hHER2-LC-Q166- | 52 | CTGAGCTGGCTGCTGAGACTGCTGAACGACAGCAAGGACTCCACCTACAG | 809 |
| GDSLSWLLRLLN-D167 | | TCTCAGCAGCCAGCTCAGGCTGTCGCCCTGCTCGGTGACGCTCTCCTG | 810 |
| anti-hHER2-LC-D167- | 53 | CTGAGCTGGCTGCTGAGACTGCTGAACAGCAAGGACTCCACCTACAGCC | 811 |
| GDSLSWLLRLLN-S168 | | TCTCAGCAGCCAGCTCAGGCTGTCGCCGTCCTGCTCGGTGACGCTCTC | 812 |
| anti-hHER2-LC-T197- | 54 | CTGAGCTGGCTGCTGAGACTGCTGAACCACCAGGGCCTGTCCAGCC | 813 |
| GDSLSWLLRLLN-H198 | | TCTCAGCAGCCAGCTCAGGCTGTCGCCGGTCACCTCGCAGGCGTACAC | 814 |
| anti-hHER2-LC-H198- | 55 | CTGAGCTGGCTGCTGAGACTGCTGAACCAGGGCCTGTCCAGCCCC | 815 |
| GDSLSWLLRLLN-Q199 | | TCTCAGCAGCCAGCTCAGGCTGTCGCCGTGGGTCACCTCGCAGGCG | 816 |
| anti-hHER2-LC-Q199- | 56 | CTGAGCTGGCTGCTGAGACTGCTGAACGGCCTGTCCAGCCCCGTG | 817 |
| GDSLSWLLRLLN-G200 | | TCTCAGCAGCCAGCTCAGGCTGTCGCCCTGGTGGGTCACCTCGCAGG | 818 |
| anti-hHER2-LC-G200- | 57 | CTGAGCTGGCTGCTGAGACTGCTGAACCTGTCCAGCCCCGTGACCAAG | 819 |
| GDSLSWLLRLLN-L201 | | TCTCAGCAGCCAGCTCAGGCTGTCGCCGCCCTGGTGGGTCACCTCG | 820 |
| anti-hHER2-LC-L201- | 58 | CTGAGCTGGCTGCTGAGACTGCTGAACTCCAGCCCCGTGACCAAGAGC | 821 |
| GDSLSWLLRLLN-S202 | | TCTCAGCAGCCAGCTCAGGCTGTCGCCCAGGCCCTGGTGGGTCACC | 822 |
| anti-hHER2-LC-S202- | 59 | CTGAGCTGGCTGCTGAGACTGCTGAACAGCCCCGTGACCAAGAGCTTC | 823 |
| GDSLSWLLRLLN-S203 | | TCTCAGCAGCCAGCTCAGGCTGTCGCCGGACAGGCCCTGGTGGGTC | 824 |
| anti-hHER2-LC-S203- | 60 | CTGAGCTGGCTGCTGAGACTGCTGAACCCCGTGACCAAGAGCTTCAACAG | 825 |
| GDSLSWLLRLLN-P204 | | TCTCAGCAGCCAGCTCAGGCTGTCGCCGCTGGACAGGCCCTGGTGG | 826 |
| anti-hHER2-LC-K207- | 61 | CTGAGCTGGCTGCTGAGACTGCTGAACAGCTTCAACAGGGGCGAGTGC | 827 |
| GDSLSWLLRLLN-S208 | | TCTCAGCAGCCAGCTCAGGCTGTCGCCCTTGGTCACGGGGCTGGACAG | 828 |
| anti-hHER2-LC-T109- | 62 | CTGGAGTTCATCGCCAGCAAGCTGGCCGTGGCCGCTCCCAGCGTG | 829 |
| DSLEFIASKLA-V110 | | CTTGCTGGCGATGAACTCCAGGCTGTCCGTTCGTTTGATCTCCACCTTGGT | 830 |
| anti-hHER2-LC-V110- | 63 | CTGGAGTTCATCGCCAGCAAGCTGGCCGCCGCTCCCAGCGTGTTCATC | 831 |
| DSLEFIASKLA-A111 | | CTTGCTGGCGATGAACTCCAGGCTGTCCACCGTTCGTTTGATCTCCACCTTG | 832 |
| anti-hHER2-LC-A111- | 64 | CTGGAGTTCATCGCCAGCAAGCTGGCCGCTCCCAGCGTGTTCATCTTCC | 833 |
| DSLEFIASKLA-A112 | | CTTGCTGGCGATGAACTCCAGGCTGTCGGCCACCGTTCGTTTGATCTCC | 834 |
| anti-hHER2-LC-P119- | 65 | CTGGAGTTCATCGCCAGCAAGCTGGCCCCCAGCGACGAGCAGCTGAAG | 835 |
| DSLEFIASKLA-P120 | | CTTGCTGGCGATGAACTCCAGGCTGTCGGGGAAGATGAACACGCTGGG | 836 |
| anti-hHER2-LC-P120- | 66 | CTGGAGTTCATCGCCAGCAAGCTGGCCAGCGACGAGCAGCTGAAGAGC | 837 |
| DSLEFIASKLA-S121 | | CTTGCTGGCGATGAACTCCAGGCTGTCGGGGGGGAAGATGAACACGCTG | 838 |
| anti-hHER2-LC-S121- | 67 | CTGGAGTTCATCGCCAGCAAGCTGGCCGACGAGCAGCTGAAGAGCGGC | 839 |
| DSLEFIASKLA-D122 | | CTTGCTGGCGATGAACTCCAGGCTGTCGCTGGGGGGGAAGATGAACAC | 840 |
| anti-hHER2-LC-D122- | 68 | CTGGAGTTCATCGCCAGCAAGCTGGCCGAGCAGCTGAAGAGCGGCACC | 841 |
| DSLEFIASKLA-E123 | | CTTGCTGGCGATGAACTCCAGGCTGTCGTCGCTGGGGGGGAAGATGAAC | 842 |
| anti-hHER2-LC-Y140- | 69 | CTGGAGTTCATCGCCAGCAAGCTGGCCCCCCGGGAGGCCAAGGTG | 843 |
| DSLEFIASKLA-P141 | | CTTGCTGGCGATGAACTCCAGGCTGTCGTAGAAGTTGTTCAGCAGGCACAC | 844 |
| anti-hHER2-LC-P141- | 70 | CTGGAGTTCATCGCCAGCAAGCTGGCCCGGGAGGCCAAGGTGCAGTG | 845 |
| DSLEFIASKLA-R142 | | CTTGCTGGCGATGAACTCCAGGCTGTCGGGGTAGAAGTTGTTCAGCAGGC | 846 |
| anti-hHER2-LC-R142- | 71 | CTGGAGTTCATCGCCAGCAAGCTGGCCGAGGCCAAGGTGCAGTGGAAG | 847 |
| DSLEFIASKLA-E143 | | CTTGCTGGCGATGAACTCCAGGCTGTCCCGGGGGTAGAAGTTGTTCAGC | 848 |
| anti-hHER2-LC-E143- | 72 | CTGGAGTTCATCGCCAGCAAGCTGGCCGCCAAGGTGCAGTGGAAGGTG | 849 |
| DSLEFIASKLA-A144 | | CTTGCTGGCGATGAACTCCAGGCTGTCCTCCCGGGGGTAGAAGTTGTTC | 850 |
| anti-hHER2-LC-D151- | 73 | CTGGAGTTCATCGCCAGCAAGCTGGCCAACGCCCTGCAGAGCGGCAAC | 851 |
| DSLEFIASKLA-N152 | | CTTGCTGGCGATGAACTCCAGGCTGTCGTCCACCTTCCACTGCACCTTG | 852 |
| anti-hHER2-LC-N152- | 74 | CTGGAGTTCATCGCCAGCAAGCTGGCCGCCCTGCAGAGCGGCAACAG | 853 |
| DSLEFIASKLA-A153 | | CTTGCTGGCGATGAACTCCAGGCTGTCGTTGTCCACCTTCCACTGCACC | 854 |
| anti-hHER2-LC-A153- | 75 | CTGGAGTTCATCGCCAGCAAGCTGGCCCTGCAGAGCGGCAACAGCCAG | 855 |
| DSLEFIASKLA-L154 | | CTTGCTGGCGATGAACTCCAGGCTGTCGGCGTTGTCCACCTTCCACTG | 856 |
| anti-hHER2-LC-L154- | 76 | CTGGAGTTCATCGCCAGCAAGCTGGCCCAGAGCGGCAACAGCCAGGAG | 857 |
| DSLEFIASKLA-Q155 | | CTTGCTGGCGATGAACTCCAGGCTGTCCAGGGCGTTGTCCACCTTCCAC | 858 |
| anti-hHER2-LC-Q155- | 77 | CTGGAGTTCATCGCCAGCAAGCTGGCCAGCGGCAACAGCCAGGAGAGC | 859 |
| DSLEFIASKLA-S156 | | CTTGCTGGCGATGAACTCCAGGCTGTCCTGCAGGGCGTTGTCCACCTTC | 860 |
| anti-hHER2-LC-E161- | 78 | CTGGAGTTCATCGCCAGCAAGCTGGCCAGCGTCACCGAGCAGGACAGC | 861 |
| DSLEFIASKLA-S162 | | CTTGCTGGCGATGAACTCCAGGCTGTCCTCCTGGCTGTTGCCGCTCTG | 862 |
| anti-hHER2-LC-S162- | 79 | CTGGAGTTCATCGCCAGCAAGCTGGCCGTCACCGAGCAGGACAGCAAG | 863 |
| DSLEFIASKLA-V163 | | CTTGCTGGCGATGAACTCCAGGCTGTCGCTCTCCTGGCTGTTGCCGC | 864 |
| anti-hHER2-LC-V163- | 80 | CTGGAGTTCATCGCCAGCAAGCTGGCCACCGAGCAGGACAGCAAGGAC | 865 |
| DSLEFIASKLA-T164 | | CTTGCTGGCGATGAACTCCAGGCTGTCGACGCTCTCCTGGCTGTTGCC | 866 |
| anti-hHER2-LC-T164- | 81 | CTGGAGTTCATCGCCAGCAAGCTGGCCGAGCAGGACAGCAAGGACTCC | 867 |
| DSLEFIASKLA-E165 | | CTTGCTGGCGATGAACTCCAGGCTGTCGGTGACGCTCTCCTGGCTGTTG | 868 |
| anti-hHER2-LC-E165- | 82 | CTGGAGTTCATCGCCAGCAAGCTGGCCCAGGACAGCAAGGACTCCACC | 869 |
| DSLEFIASKLA-Q166 | | CTTGCTGGCGATGAACTCCAGGCTGTCCTCGGTGACGCTCTCCTGGC | 870 |
| anti-hHER2-LC-Q166- | 83 | CTGGAGTTCATCGCCAGCAAGCTGGCCGACAGCAAGGACTCCACCTACAG | 871 |
| DSLEFIASKLA-D167 | | CTTGCTGGCGATGAACTCCAGGCTGTCCTGCTCGGTGACGCTCTCCTG | 872 |
| anti-hHER2-LC-D167- | 84 | CTGGAGTTCATCGCCAGCAAGCTGGCCAGCAAGGACTCCACCTACAGCC | 873 |
| DSLEFIASKLA-S168 | | CTTGCTGGCGATGAACTCCAGGCTGTCGTCCTGCTCGGTGACGCTCTC | 874 |
| anti-hHER2-LC-T197- | 85 | CTGGAGTTCATCGCCAGCAAGCTGGCCCACCAGGGCCTGTCCAGCC | 875 |
| DSLEFIASKLA-H198 | | CTTGCTGGCGATGAACTCCAGGCTGTCGGTCACCTCGCAGGCGTACAC | 876 |
| anti-hHER2-LC-H198- | 86 | CTGGAGTTCATCGCCAGCAAGCTGGCCCAGGGCCTGTCCAGCCCC | 877 |
| DSLEFIASKLA-Q199 | | CTTGCTGGCGATGAACTCCAGGCTGTCGTGGGTCACCTCGCAGGCG | 878 |
| anti-hHER2-LC-Q199- | 87 | CTGGAGTTCATCGCCAGCAAGCTGGCCGGCCTGTCCAGCCCCGTG | 879 |
| DSLEFIASKLA-G200 | | CTTGCTGGCGATGAACTCCAGGCTGTCCTGGTGGGTCACCTCGCAGG | 880 |
| anti-hHER2-LC-G200- | 88 | CTGGAGTTCATCGCCAGCAAGCTGGCCCTGTCCAGCCCCGTGACCAAG | 881 |
| DSLEFIASKLA-L201 | | CTTGCTGGCGATGAACTCCAGGCTGTCGCCCTGGTGGGTCACCTCG | 882 |
| anti-hHER2-LC-L201- | 89 | CTGGAGTTCATCGCCAGCAAGCTGGCCTCCAGCCCCGTGACCAAGAGC | 883 |
| DSLEFIASKLA-S202 | | CTTGCTGGCGATGAACTCCAGGCTGTCCAGGCCCTGGTGGGTCACC | 884 |
| anti-hHER2-LC-S202- | 90 | CTGGAGTTCATCGCCAGCAAGCTGGCCAGCCCCGTGACCAAGAGCTTC | 885 |
| DSLEFIASKLA-S203 | | CTTGCTGGCGATGAACTCCAGGCTGTCGGACAGGCCCTGGTGGGTC | 886 |
| anti-hHER2-LC-S203- | 91 | CTGGAGTTCATCGCCAGCAAGCTGGCCCCCGTGACCAAGAGCTTCAACAG | 887 |
| DSLEFIASKLA-P204 | | CTTGCTGGCGATGAACTCCAGGCTGTCGCTGGACAGGCCCTGGTGG | 888 |
| anti-hHER2-LC-K207- | 92 | CTGGAGTTCATCGCCAGCAAGCTGGCCAGCTTCAACAGGGGCGAGTGC | 889 |
| DSLEFIASKLA-S208 | | CTTGCTGGCGATGAACTCCAGGCTGTCCTTGGTCACGGGGCTGGACAG | 890 |
| B. subtilis Sfp pET22b | | GAAGGAGATATACATATGAAAATTTATGGGATTTACATGGATCGC | 891 |
| | | GTGGTGGTGGTGGTGGTGCAGCAATTCTTCATAGGAGACCATCG | 892 |
| pET22b | | CACCACCACCACCACCACTGAG | 893 |
| | | CATATGTATATCTCCTTCTTAAAGTTAAACAAAATTATTTC | 894 |
| TEV into B. subtilis Sfp | | GAGAACCTGTACTTCCAAGGCCACCACCACCACCACCACTGAG | 895 |
| pET22b | | GCCTTGGAAGTACAGGTTCTCCAGCAATTCTTCATAGGAGACCATCG | 896 |
| B. subtilis Sfp K28E | | GTCTTTCATTTCACCAGAGGAGCGCGAAAAATGCCGTCGCT | 897 |
| | | AGCGACGGCATTTTTCGCGCTCCTCTGGTGAAATGAAAGAC | 898 |
| B. subtilis Sfp T44E | | AAAGAAGATGCTCACCGCGAGCTGCTGGGAGATGTGCTG | 899 |
| | | CAGCACATCTCCCAGCAGCTCGCGGTGAGCATCTTCTTT | 900 |
| B. subtilis Sfp C77Y | | GCAGGAATATGGCAAACCGTATATTCCAGATCTTCCAGATGC | 901 |
| | | GCATCTGGAAGATCTGGAATATACGGTTTGCCATATTCCTGC | 902 |
| E. coli AcpS pET22b | | AATAATTTTGTTTAACTTTAAGAAGGAGATATACATATGGCAATATTAGGTTT | 903 |
| | | AGGCACG | |
| | | CAGTGGTGGTGGTGGTGGTGACTTTCAATAATTACCGTGGCACAAGC | 904 |
| pET22b | | CACCACCACCACCACCACTG | 905 |
| | | ATGTATATCTCCTTCTTAAAGTTAAACAAAATTATT | 906 |
| anti-hHER2-HC-V64L- | 99 | CTGGAGTTCATCGCCAGCAAGCTGGCCAAGGGCCGTTTCACTATAAGCGC | 907 |
| EFIASKLA-K65 | | CTTGCTGGCGATGAACTCCAGGCTATCGGCATATCTAGTATAACCATTCGTAG | 908 |
| | | G | |
| anti-hHER2-HC-S63- | 97 | GACAGCCTGGAGTTCATCGCCAGCAAGGTCAAGGGCCGTTTCACTATAAGC | 909 |
| LEFIASK-V64 | | CTTGCTGGCGATGAACTCCAGGCTGTCGGCATATCTAGTATAACCATTCGTAG | 910 |
| | | G | |
| anti-hHER2-HC-V64L- | 98 | GACAGCCTGGAGTTCATCGCCAGCAAGGGCCGTTTCACTATAAGCGCAGAC | 911 |
| EFIAS-K65 | | CTTGCTGGCGATGAACTCCAGGCTGTCGGCATATCTAGTATAACCATTCGTAG | 912 |
| | | G | |
| anti-hHER2-LC-S76D-S77- | 30 | CTGGAGTTCATCGCCAGCAAGCTGGCCCAGCCGGAAGACTTCGCAACTTATT | 913 |
| L78-EFIASKLA-Q79 | | AC | |
| | | CTTGCTGGCGATGAACTCCAGGCTGTCGATGGTCAGAGTGAAATCCGTCC | 914 |
| anti-hHER2-HC-S132G- | 101 | CTGAGCTGGCTGCTGAGACTGCTGAACTGCCTGGTGAAGGACTACTTCC | 915 |
| K133D-S134-T135L-S136- | | TCTCAGCAGCCAGCTCAGGCTGTCGCCGCTGGGGGCCAGGGGG | 916 |
| G137W-G138L-T139L- | | | |
| A140R-A141L-L142- | | | |
| G143N | | | |
| anti-hHER2-HC-K133G- | 103 | CTGAGCTGGCTGCTGAGACTGCTGAACACAGCCGCCCTGGGCTGC | 917 |
| S134D-T135S-S136L- | | TCTCAGCAGCCAGCTCAGGCTGTCGCCGCTGCTGGGGGCCAGGG | 918 |
| G137S-G138W-LLRLLN- | | | |
| T139 | | | |
| anti-hHER2-HC-S134G- | 105 | GGCGACAGCCTGAGCTGGCTGGCCCTGGGCTGCCTGGTG | 919 |
| T135D-S136-G137L- | | CAGCCAGCTCAGGCTGTCGCCCTTGCTGCTGGGGGCCAGG | 920 |
| G138S-T139W-A140L | | | |
| anti-hHER2-HC-S134G- | 106 | CTGAGACTGCTGAACGCCCTGGGCTGCCTGGTG | 921 |
| T135D-S136-G137L- | | GTTCAGCAGTCTCAGCAGCCAGCTCAGGCTGTCGC | 922 |
| G138S-T139W-A140L- | | | |
| LRLLN-A141 | | | |
| anti-hHER2-HC-T135G- | 108 | CTGAGCTGGCTGCTGAGACTGCTGAACGCCGCCCTGGGCTGCCTG | 923 |
| S136D-G137S-G138L- | | TCTCAGCAGCCAGCTCAGGCTGTCGCCGCTCTTGCTGCTGGGGGCC | 924 |
| T139S-WLLRLLN-A140 | | | |
| anti-hHER2-HC-T359G- | 123 | GGCGACAGCCTGAGCTGGCTGACCTGTCTGGTGAAGGGCTTC | 925 |
| K360D-N361S-Q362L- | | CAGCCAGCTCAGGCTGTCGCCCATCTCCTCCCGGGAGGGG | 926 |
| V363S-S364W | | | |
| anti-hHER2-HC-S132G- | 100 | GGCGACAGCCTGAGCTGGCTGACAGCCGCCCTGGGCTGC | 927 |
| K133D-S134-T135L-S136- | | CAGCCAGCTCAGGCTGTCGCCGCTGGGGGCCAGGGGG | 928 |
| G137W-G138L | | | |
| anti-hHER2-HC-S134G- | 107 | CTGAGCTGGCTGCTGAGACTGCTGAACGTGAAGGACTACTTCCCCGAGC | 929 |
| T135D-S136-G137L- | | TCTCAGCAGCCAGCTCAGGCTGTCGCCCTTGCTGCTGGGGGCCAGG | 930 |
| G1385-T139W-A140L- | | | |
| A141L-L142R-G143L- | | | |
| C144L-L145N | | | |
| anti-hHER2-HC-L193G- | 117 | GGCGACAGCCTGAGCTGGCTGTGCAACGTGAACCACAAGCCCAG | 931 |
| G194D-T195S-Q196L- | | CAGCCAGCTCAGGCTGTCGCCGCTGCTGCTGGGCACTGTC | 932 |
| T197S-Y198W-I199L | | | |
| anti-hHER2-HC-L193G- | 118 | CTGAGACTGCTGAACTGCAACGTGAACCACAAGCCCAG | 933 |
| G194D-T195S-Q196L- | | GTTCAGCAGTCTCAGCAGCCAGCTCAGGCTGTCGC | 934 |
| T197S-Y198W-I199L- | | | |
| LRLLN-C200 | | | |
| anti-hHER2-HC-L193G- | 119 | CTGAGCTGGCTGCTGAGACTGCTGAACAAGCCCAGCAACACCAAGGTGG | 935 |
| G194D-T195S-Q196L- | | TCTCAGCAGCCAGCTCAGGCTGTCGCCGCTGCTGCTGGGCACTGTC | 936 |
| T197S-Y198W-I199L- | | | |
| C200L-N201R-V202L- | | | |
| N203L-H204N | | | |
| anti-hHER2-HC-E357G- | 120 | GGCGACAGCCTGAGCTGGCTGTCCCTGACCTGTCTGGTGAAGG | 937 |
| M358D-T359S-K360L- | | CAGCCAGCTCAGGCTGTCGCCCTCCCGGGAGGGGGGC | 938 |
| N361S-Q362W-V363L | | | |
| anti-hHER2-HC-E388- | 126 | GGCGACAGCCTGAGCTGGCTGAACAACTACAAGACCACACCTCCAG | 939 |
| GDSLSWL-N389 | | CAGCCAGCTCAGGCTGTCGCCCTCGGGCTGGCCGTTGCTC | 940 |
| anti-hHER2-HC-P189G- | 109 | GCGACAGCCTGAGCTGGCTGCAGACCTACATCTGCAACGTGAAC | 941 |
| S190D-S191-S192L-L193S- | | CAGCCAGCTCAGGCTGTCGCCCACTGTCACCACGCTGGACAG | 942 |
| G194W-T195L | | | |
| anti-hHER2-HC-P189G- | 111 | CTGAGCTGGCTGCTGAGACTGCTGAACAACGTGAACCACAAGCCCAGCAAC | 943 |
| S190D-S191-S192L-L193S- | | TCTCAGCAGCCAGCTCAGGCTGTCGCCCACTGTCACCACGCTGGACAG | 944 |
| G194W-T195L-Q196L- | | | |
| T197R-Y198L-I199L- | | | |
| C200N | | | |
| anti-hHER2-HC-L398G- | 134 | CTGAGCTGGCTGCTGAGACTGCTGAACTTCCTGTACAGCAAGCTGACCGTG | 945 |
| D399-S400-D401L-G402S- | | TCTCAGCAGCCAGCTCAGGCTGTCGCCCACTGGAGGTGTGGTCTTGTAG | 946 |
| S403W-F404L-LRLLN-F405 | | | |
| anti-hHER2-HC-P189G- | 110 | CTGAGACTGCTGAACCAGACCTACATCTGCAACGTGAAC | 947 |
| S190D-S191-S192L-L193S- | | GTTCAGCAGTCTCAGCAGCCAGCTCAGGCTGTCGC | 948 |
| G194W-T195L-LRLLN- | | | |
| Q196 | | | |
| anti-hHER2-HC-P189D- | 112 | CTGGAGTTCATCGCCAGCAAGCTGGCCTGCAACGTGAACCACAAGCCCAG | 949 |
| S190-S191L-S192E-L193F- | | CTTGCTGGCGATGAACTCCAGGCTGTCCACTGTCACCACGCTGGACAG | 950 |
| G1941-T195A-Q196S- | | | |
| T197K-Y198L-I199A | | | |
| anti-hHER2-HC-S190G- | 113 | CTGAGCTGGCTGCTGAGACTGCTGAACTACATCTGCAACGTGAACCACAAGC | 951 |
| S191D-S192-L193-G194S- | | TCTCAGCAGCCAGCTCAGGCTGTCGCCGGGCACTGTCACCACGCTGG | 952 |
| T195W-Q196L-T197L- | | | |
| RLLN-Y198 | | | |
| anti-hHER2-HC-S190D- | 115 | CTGGAGTTCATCGCCAGCAAGCTGGCCAACGTGAACCACAAGCCCAGCAAC | 953 |
| S191-S192L-L193E- | | CTTGCTGGCGATGAACTCCAGGCTGTCGGGCACTGTCACCACGCTGG | 954 |
| G194F-T1951-Q196A- | | | |
| T197S-Y198K-I199L- | | | |
| C200A | | | |
| anti-hHER2-HC-D413- | 137 | AGCCTGAGCTGGCTGCTGAGACTGCTGTTCAGCTGCAGCGTGATGCACG | 955 |
| K414S-S415L-R416S- | | CAGCAGTCTCAGCAGCCAGCTCAGGCTGTCCACGGTCAGCTTGCTGTAC | 956 |
| W417-Q418L-Q419L- | | | |
| G420R-N421L-V422L | | | |
| anti-hHER2-HC-D413- | 138 | AGCCTGGAGTTCATCGCCAGCAAGCTGTTCAGCTGCAGCGTGATGCACG | 957 |
| K414S-S415L-R416E- | | CAGCTTGCTGGCGATGAACTCCAGGCTGTCCACGGTCAGCTTGCTGTAC | 958 |
| W417F-Q4181-Q419A- | | | |
| G420S-N421K-V422L | | | |
| anti-hHER2-HC-E382D- | 125 | GACAGCCTGGAGTTCATCGCCAACAACTACAAGACCACACCTCCAG | 959 |
| S383-N384L-G385E- | | GGCGATGAACTCCAGGCTGTCCCACTCCACGGCGATGTCGC | 960 |
| Q386F-P3871-E388A | | | |
| anti-hHER2-HC-E382D- | 124 | GACAGCCTGAGCTGGCTGCTGAACAACTACAAGACCACACCTCCAG | 961 |
| S383-N384L-G385S- | | CAGCAGCCAGCTCAGGCTGTCCCACTCCACGGCGATGTCGC | 962 |
| Q386W-P387L-E388L | | | |
| anti-hHER2-HC-V2- | 94 | CTGAGCTGGCTGCTGAGACTGCTGAACCAGCTGGTGGAGTCTGGCGG | 963 |
| GDSLSWLLRLLN-Q3 | | TCTCAGCAGCCAGCTCAGGCTGTCGCCAACCTCAGCAGTGGCACCGGG | 964 |
| anti-hHER2-LC-I2- | 26 | CTGAGCTGGCTGCTGAGACTGCTGAACCAGATGACCCAGTCCCCGAGC | 965 |
| GDSLSWLLRLLN-Q3 | | TCTCAGCAGCCAGCTCAGGCTGTCGCCGATATCAGCAGTGGCACCGGG | 1095 |
| anti-hHER2-LC-C214- | 28 | CTGAGCTGGCTGCTGAGACTGCTGAACTAATCTAGACACCTCAGACAATCAA | 966 |
| GDSLSWLLRLLN | | CC | |
| | | TCTCAGCAGCCAGCTCAGGCTGTCGCCGCACTCGCCCCTGTTGAAGC | 967 |
| anti-hHER2-LC-I2- | 27 | CTGGAGTTCATCGCCAGCAAGCTGGCCCAGATGACCCAGTCCCCGAG | 968 |
| DSLEFIASKLA-Q3 | | CTTGCTGGCGATGAACTCCAGGCTGTCGATATCAGCAGTGGCACCGGG | 969 |
| anti-hHER2-LC-C214- | 29 | CTGGAGTTCATCGCCAGCAAGCTGGCCTAATCTAGACACCTCAGACAATCAAC | 970 |
| DSLEFIASKLA | | C | |
| | | CTTGCTGGCGATGAACTCCAGGCTGTCGCACTCGCCCCTGTTGAAGC | 971 |
| anti-hHER2-HC-V2- | 95 | CTGGAGTTCATCGCCAGCAAGCTGGCCCAGCTGGTGGAGTCTGGCGG | 972 |
| DSLEFIASKLA-Q3 | | CTTGCTGGCGATGAACTCCAGGCTGTCAACCTCAGCAGTGGCACCGG | 973 |
| anti-hHER2-HC-K447- | 140 | CTGAGCTGGCTGCTGAGACTGCTGAACTAATCTAGACACCTCAGACAATCAA | 974 |
| GDSLSWLLRLLN | | CC | |
| | | TCTCAGCAGCCAGCTCAGGCTGTCGCCCTTGCCGGGGGACAGGCTC | 975 |
| anti-hHER2-HC-K447- | 141 | CTGGAGTTCATCGCCAGCAAGCTGGCCTAATCTAGACACCTCAGACAATCAAC | 976 |
| DSLEFIASKLA | | C | |
| | | CTTGCTGGCGATGAACTCCAGGCTGTCCTTGCCGGGGGACAGGCTC | 977 |
| anti-hHER2-HC-S132D- | 102 | CTGGAGTTCATCGCCAGCAAGCTGGCCGGCTGCCTGGTGAAGGACTAC | 978 |
| K133S-S134L-T135E- | | CTTGCTGGCGATGAACTCCAGGCTGTCGCTGGGGGCCAGGGGG | 979 |
| S136F-G137I-G138A- | | | |
| T139S-A140K-A141L- | | | |
| L142A | | | |
| anti-hHER2-HC-S190D- | 114 | AGCCTGGAGTTCATCGCCAGCAAGCTGTGCAACGTGAACCACAAGCCCAG | 980 |
| S191-S192L-L193E- | | CTTGCTGGCGATGAACTCCAGGCTGTCGGGCACTGTCACCACGCTGG | 981 |
| G194F-T195I-Q196A- | | | |
| T197S-Y198K-I199L | | | |
| anti-hHER2-HC-S191D- | 116 | GACAGCCTGGAGTTCATCGCCAGCAAGTGCAACGTGAACCACAAGCCCAG | 982 |
| S192-L193-G194E-T195F- | | CTTGCTGGCGATGAACTCCAGGCTGTCGCTGGGCACTGTCACCACGC | 983 |
| Q1961-T197A-Y198S- | | | |
| I199K | | | |
| anti-hHER2-HC-L398D- | 135 | CTGGAGTTCATCGCCAGCAAGCTGGCCAAGCTGACCGTGGACAAGTCCAG | 984 |
| D399S-S400L-D401E- | | CTTGCTGGCGATGAACTCCAGGCTGTCCACTGGAGGTGTGGTCTTGTAG | 985 |
| G402F-S4031-F404A- | | | |
| F405S-L406K-Y407L- | | | |
| S408A | | | |
| anti-hHER2-HC-E388- | 131 | GACAGCCTGGAGTTCATCGCCAGCAAGAACAACTACAAGACCACACCTCCAG | 986 |
| DSLEFIASK-N389 | | CTTGCTGGCGATGAACTCCAGGCTGTCCTCGGGCTGGCCGTTGCTC | 987 |
| anti-hHER2-HC-E388- | 130 | AGCCTGGAGTTCATCGCCAGCAAGCTGAACAACTACAAGACCACACCTCCAG | 988 |
| DSLEFIASKL-N389 | | CTTGCTGGCGATGAACTCCAGGCTGTCCTCGGGCTGGCCGTTGCTC | 989 |
| pET22b/TEV | | GAGAACCTGTACTTCCAAGGCCAC | 990 |
| | | ATGTATATCTCCTTCTTAAAGTTAAACAAAATTATTTC | 991 |
| | | CACCACCACCACCACCACTGAG | 992 |
| PPTase_C. | | TTGGAAGTACAGGTTCTCACGTTCGCAGAGGAATTTACACACTTC | 993 |
| thermocellum_pET22b/TEV | | TAAGAAGGAGATATACATATGGGTTTTCTGCCGAAAGAGAAAAAG | 994 |
| ACP_C. thermocellum_ | | GTGGTGGTGGTGGTGGTGGCTATTATTTTTAATATATTCAACGACGTCGC | 995 |
| pET22b | | TAAGAAGGAGATATACATATGTTCGAGAAAGTCCGTAAAATCATTGC | 996 |
| ACP_E.coli_pET22b | | GTGGTGGTGGTGGTGGTGCGCCTGGTGGCCGTTGATGTAATC | 997 |
| | | TAAGAAGGAGATATACATATGAGCACTATCGAAGAACGCGTTAAG | 998 |
| anti-hHER2-HC-E388- | 132 | CTGGACATGCTGGAGTGGAGCCTGATGAACAACTACAAGACCACACCTCCAG | 999 |
| GDSLDMLEWSLM-N389 | | CCACTCCAGCATGTCCAGGCTGTCGCCCTCGGGCTGGCCGTTGCTC | 1000 |
| anti-hHER2-HC-V2- | 96 | CTGGACATGCTGGAGTGGAGCCTGATGCAGCTGGTGGAGTCTGGCGG | 1001 |
| GDSLDMLEWSLM-Q3 | | CCACTCCAGCATGTCCAGGCTGTCGCCAACCTCAGCAGTGGCACCGG | 1002 |
| mAb2-HC-T359- | 148 | CTGAGCTGGCTGCTGAGACTGCTGAACAAGAACCAGGTCAGCCTGACCTG | 1003 |
| GDSLSWLLRLLN-K360 | | TCTCAGCAGCCAGCTCAGGCTGTCGCCGGTCATCTCCTCCCGGGATG | 1004 |
| mAb2-HC-E388- | 149 | CTGAGCTGGCTGCTGAGACTGCTGAACAACAACTACAAGACCACGCCTCCC | 1005 |
| GDSLSWLLRLLN-N389 | | TCTCAGCAGCCAGCTCAGGCTGTCGCCCTCCGGCTGCCCATTGCTCTC | 1006 |
| anti-hHER2-HC-Y296- | 143 | CTGAGCTGGCTGCTGAGACTGCTGAACAACAGCACCTACAGGGTGGTGTC | 1007 |
| GDSLSWLLRLLN-N297 | | TCTCAGCAGCCAGCTCAGGCTGTCGCCGTACTGCTCCTCTCTGGGCTTG | 1096 |
| anti-hHER2-HC-N297- | 145 | CTGAGCTGGCTGCTGAGACTGCTGAACAGCACCTACAGGGTGGTGTCC | 1008 |
| GDSLSWLLRLLN-S298 | | TCTCAGCAGCCAGCTCAGGCTGTCGCCGTTGTACTGCTCCTCTCTGGGC | 1097 |
| anti-hHER2-HC-Y296- | 144 | CTGGAGTTCATCGCCAGCAAGCTGGCCAACAGCACCTACAGGGTGGTGTC | 1009 |
| DSLEFIASKLA-N297 | | CTTGCTGGCGATGAACTCCAGGCTGTCGTACTGCTCCTCTCTGGGCTTG | 1098 |
| anti-hHER2-HC-N297- | 146 | CTGGAGTTCATCGCCAGCAAGCTGGCCAGCACCTACAGGGTGGTGTCC | 1010 |
| DSLEFIASKLA-S298 | | CTTGCTGGCGATGAACTCCAGGCTGTCGTTGTACTGCTCCTCTCTGGGC | 1099 |
| Tras_HC_S6_i415_S418A | | GCCCGAGGGCGACGCCCTGAGCTGGCTG | 1011 |
| | | CAGCCAGCTCAGGGCGTCGCCCTCGGGC | 1100 |
| Human PPTase_N-His6 | | CATCACCATCACCATCACGTTTTCCCTGCCAAACGGTTCTGC | 1012 |
| (PIPE cloning)(‘His6’ | | ACGGGCCCTCTAGACTTATGACTTTGTACCATTTCGTATTGGAATTTC | 1101 |
| disclosed as SEQ ID NO: | | | |
| 1106) | | | |
| pRS_N-His6 (PIPE cloning) | | TAAGTCTAGAGGGCCCGTTTAAACC | 1013 |
| (‘His6’ disclosed as SEQ ID | | GTGATGGTGATGGTGATGAGGCTGAGCAGTGGCACCGG | 1102 |
| NO: 1106) | | | |
| Human PPTase_C-His6 | | GGTGCCACTGCTCAGCCTGTTTTCCCTGCCAAACGGTTCTGC | 1014 |
| (PIPE cloning)(‘His6’ | | GTGATGGTGATGGTGATGTGACTTTGTACCATTTCGTATTGGAATTTC | 1103 |
| disclosed as SEQ ID NO: | | | |
| 1106) | | | |
| pRS_C-His6 (PIPE cloning) | | CATCACCATCACCATCACTAAGTCTAG | 1015 |
| (‘His6’ disclosed as SEQ ID | | AGGCTGAGCAGTGGCACCGG | 1104 |
| NO: 1106) | | | |
| T. maritima PPTase | | ATGATAGTCGGTGTGGGTATTGATG | 1016 |
| | | TTACTCTCCGATGAGGATGTTACC | 1105 |

Top = Forward primer
Bottom = Reverse primer

TABLE 9
Expression yields of Trastuzumab IgGs with inserted/grafted peptide-tags (HC, heavy
chain; LC, light chain). The values in brackets, ( ) [ ], correspond to antibody yields after scale-up.

| Construct (whole antibody tested, the name represents part of | Yield per | | |
|---|---|---|---|
| the HC or LC that contains the peptide tag, the paired wildtype | liter culture/ | Expression | |
| chain is not listed) | mg | scale/L | SEQ ID NO |
| anti-hHER2-HC-S134G-T135D-S136-G137L-G138S-T139W-A140L | 26 | 0.02 | 105 |
| anti-hHER2-HC-L193G-G194D-T195S-Q196L-T197S-Y198W-I199L | 73 | 0.02 | 117 |
| anti-hHER2-HC-P189G-S190D-S191-S192L-L193S-G194W-T195L | 61 (36) | 0.02 (1) | 109 |
| anti-hHER2-HC-T359G-K360D-N361S-Q362L-V363S-S364W | 43 | 0.02 | 123 |
| anti-hHER2-HC-T359-GDSLSWLLRLLN-K360 | 45 (29) | 0.02 (1) | 121 |
| mAb2-HC-T359-GDSLSWLLRLLN-K360 | 78 | 0.05 | 148 |
| mAb2-HC-E388-GDSLSWLLRLLN-N389 | 26 | 0.05 | 149 |
| anti-hHER2-HC-E357G-M358D-T359S-K360L-N361S-Q362W-V363L | 59 | 0.02 | 120 |
| anti-hHER2-HC-E388-GDSLSWLLRLLN-N389 | 39 (13) [16] | 0.02 (1) [0.5] | 127 |
| anti-hHER2-HC-E388-GDSLSWL-N389 | 39 | 0.02 | 126 |
| anti-hHER2-LC-C214-GDSLSWLLRLLN | 42 | 0.02 | 28 |
| anti-hHER2-HC-S134G-T135D-S136-G137L-G138S-T139W-A140L- | 2 | 0.05 | 106 |
| LRLLN-A141 | | | |
| anti-hHER2-HC-K133G-S134D-T135S-S136L-G137S-G138W- | 19 | 0.05 | 103 |
| LLRLLN-T139 | | | |
| anti-hHER2-HC-P189G-S190D-S191-S192L-L193S-G194W-T195L- | 48 | 0.3 | 110 |
| LRLLN-Q196 | | | |
| anti-hHER2-HC-S190G-S191D-S192-L193-G194S-T195W-Q196L- | 33 | 0.05 | 113 |
| T197L-RLLN-Y198 | | | |
| anti-hHER2-HC-V2-GDSLSWLLRLLN-Q3 | 20 (11) | 0.05 (0.5) | 94 |
| anti-hHER2-LC-I2-GDSLSWLLRLLN-Q3 | 3 | 0.05 | 26 |
| anti-hHER2-LC-I2-DSLEFIASKLA-Q3 | 43 (29) | 0.05 (0.4) | 27 |
| anti-hHER2-LC-C214-DSLEFIASKLA | 55 | 0.05 | 29 |
| anti-hHER2-HC-V2-DSLEFIASKLA-Q3 | 34 (20) | 0.05 (0.4) | 95 |
| anti-hHER2-HC-K447-DSLEFIASKLA | 32 | 0.05 | 141 |
| anti-hHER2-HC-S132D-K133S-S134L-T135E-S136F-G137I-G138A- | 32 | 0.05 | 102 |
| T139S-A140K-A141L-L142A | | | |
| anti-hHER2-HC-S190D-S191-S192L-L193E-G194F-T195I-Q196A- | 41 | 0.05 | 114 |
| T197S-Y198K-I199L | | | |
| anti-hHER2-HC-S191D-S192-L193-G194E-T195F-Q196I-T197A- | 30 | 0.05 | 116 |
| Y198S-I199K | | | |
| anti-hHER2-HC-L398D-D399S-S400L-D401E-G402F-S403I-F404A- | 13 | 0.05 | 135 |
| F405S-L406K-Y407L-S408A | | | |
| anti-hHER2-HC-Y296-GDSLSWLLRLLN-N297 | 23 | 0.05 | 143 |
| anti-hHER2-HC-N297-GDSLSWLLRLLN-S298 | 23 | 0.05 | 145 |
| anti-hHER2-HC-Y296-DSLEFIASKLA-N297 | 21 | 0.05 | 144 |
| anti-hHER2-HC-N297-DSLEFIASKLA-S298 | 23 | 0.05 | 146 |
| anti-hHER2-HC-E388-DSLEFIASKLA-N389 | 36 (15) | 0.05 (0.5) | 129 |
| anti-hHER2-HC-E388-DSLEFIASKL-N389 | 35 (20) | 0.05 (0.5) | 130 |
| anti-hHER2-HC-E388-DSLEFIASK-N389 | 56 | 0.05 | 131 |
| anti-hHER2-HC-T359-DSLEFIASKLA-K360 | 43 (18) | 0.05 (0.5) | 122 |
| anti-hHER2-HC-S190D-S191-S192L-L193E-G194F-T195I-Q196A- | 19 | 0.05 | 115 |
| T197S-Y198K-I199L-C200A | | | |
| anti-hHER2-HC-P189D-S190-S191L-S192E-L193F-G194I-T195A- | 40 | 0.05 | 112 |
| Q196S-T197K-Y198L-I199A | | | |
| anti-hHER2-HC-D413-K414S-S415L-R416E-W417F-Q418I-Q419A- | 29 | 0.05 | 138 |
| G420S-N421K-V422L | | | |
| anti-hHER2-HC-E382D-S383-N384L-G385E-Q386F-P387I-E388A | 39 | 0.05 | 125 |
| anti-hHER2-HC-E382D-S383-N384L-G385S-Q386W-P387L-E388L | 33 | 0.05 | 124 |
| anti-hHER2-LC-S76D-S77-L78-EFIASKLA-Q79 | 13 | 0.05 | 30 |
| anti-hHER2-HC-S63-LEFIASK-V64 | 12 | 0.05 | 97 |
| anti-hHER2-HC-V64L-EFIAS-K65 | 23 | 0.05 | 98 |
| anti-hHER2-HC-V64L-EFIASKLA-K65 | 11 | 0.05 | 99 |
| anti-hHER2-HC-V2-GDSLSWLLRLLN-Q3-E388-DSLEFIASKLA-N389 | 8 (19) | 0.05 (0.4) | 142 |
| anti-hHER2-HC-V2-GDSLDMLEWSLM-Q3 | 56 | 0.05 | 96 |
| anti-hHER2-HC-E388-GDSLDMLEWSLM-N389 | 32 | 0.05 | 132 |

### Example 3

### Production of Sfp 4′-Phosphopantetheinyl Transferase (PPTase)

[0834] The B. subtilis Sfp PPTase was cloned into the pET22b expression vector by using the PIPE method (see Klock et al., Proteins 71:982-994 (2008)). To allow cleavage of the C-terminal His₆ tag (SEQ ID NO:1106), a TEV (tobacco etch virus) protease recognition site was inserted downstream of the Sfp coding sequence. All primers used for cloning are listed in Table 8.

[0835] Protein expression and purification were performed according to Yin et al. (see Nat. Protoc. 1:280-285 (2006)) with some minor modifications. First, a 5 mL LB starter culture was inoculated from the glycerol stock of E. coli BL21 (DE3) cells harboring the pET22b/sfp expression plasmid. The culture was grown to saturation by overnight incubation at 37° C. at 300 rpm. The next day, the starter culture was used to inoculate 1 L of TB medium (Sigma), which was agitated at 300 rpm and maintained at 37° C. After reaching an optical density of 0.5 at 600 nm, the culture was induced by the addition of IPTG to a final concentration of 1 mM and the temperature was reduced to 30° C. The culture was shaken for another 12-16 hours and the bacterial cells were harvested by centrifugation. Prior to use, the cell pellet was stored at −20° C.

[0836] To initiate protein purification, the frozen pellet was thawed for 15 minutes on ice and re-suspended in a buffer containing 20 mM Tris/HCl (pH 7.9), 0.5 M NaCl, 5 mM imidazole, and 2 U/mL DNase I (3 mL of buffer per g wet weight of cells). Cell lysis was induced by sonication for 4 min, with intervals of 0.5 sec on and 0.5 sec off. In order to remove insoluble cell debris, the resulting lysate was centrifuged at 40,000×g for 20 min at 4° C. The His₆-tagged Sfp enzyme (‘His₆’ disclosedas SEQ ID NO: 1106) was then captured by the addition of 4 mL of 50% Ni-NTA slurry (Qiagen) to the cleared lysate. After shaking for 1 hour at 4° C., the resin-lysate mixture was poured into a disposable column (Bio-Rad). The settled resin was washed with 25 column volumes of 50 mM NaH₂PO₄, 300 mM NaCl, 20 mM imidazole (pH 8.0) and eluted with 5 column volumes of 50 mM NaH₂PO₄, 300 mM NaCl, 250 mM imidazole (pH 8.0). Purified Sfp enzyme was then dialyzed twice against 10 mM Tris/HCl, 1 mM EDTA, 10% glycerol (pH 7.5) using a Slide-A-Lyzer Dialysis Cassette (Pierce) with a 3.5 kDa cut-off, and subsequently concentrated to a final concentration of at least 100 μM using an Amicon Ultra-15 Centrifugal Filter Unit (Millipore) with a 10 kDa cut-off. Finally, the concentrated enzyme was aliquoted, flash-frozen in liquid nitrogen, and stored at −80° C.

[0837] In order to improve the purity of Sfp using reverse Ni-NTA chromatography, a TEV cleavage site was introduced before the C-terminal His₆ tag (SEQ ID NO:1106). Ni-NTA purification of this construct was performed as described above. However, after elution, the Sfp enzyme was exchanged into TEV cleavage buffer containing 50 mM Tris/HCl, 50 mM NaCl (pH 8.0). His₆ tag (SEQ ID NO:1106) removal was carried out by digestion with 7% (w/w) TEV protease at 23° C. for 1 hour and then at 4° C. for 16 hours. The TEV-digested Sfp enzyme was then reloaded onto a Ni-NTA column equilibrated with 1×PBS (pH 7.2). The cleaved enzyme was collected from the column flow-through and from a washing step involving 5 column volumes of 50 mM NaH₂PO₄, 300 mM NaCl, 20 mM imidazole (pH 8.0). Purified Sfp enzyme was then dialyzed twice against 10 mM Tris/HCl, 1 mM EDTA, 10% glycerol (pH 7.5) using a Slide-A-Lyzer Dialysis Cassette (Pierce) with a 3.5 kDa cut-off. Following dialysis, Sfp was concentrated to a final concentration of at least 100 μM using an Amicon Ultra-15 Centrifugal Filter Unit (Millipore) with a 10 kDa cut-off. Finally, the concentrated enzyme was aliquoted, flash-frozen in liquid nitrogen, and stored at −80° C.

[0838] The purity of Sfp was assessed by SDS-PAGE. His₆ tag (SEQ ID NO:1106) removal was verified by LC-MS and Sfp yield was quantified by ultraviolet spectroscopy at 280 nm (ND-1000 UV-Vis Spectrophotometer, NanoDrop Technologies, Wilmington, Del.) using a molar extinction coefficient of 28620 M⁻¹ cm⁻¹. 48 mg of TEV-cleaved Sfp enzyme was obtained per liter culture.

### Example 4

### Identification and Production of PPTase Homologs and Mutants

### Sfp Mutant R4-4

[0839] Using standard molecular biology methods, we inserted the following mutations into the B. subtilis Sfp PPTase: Lys28Glu, Thr44Glu, and Cys77Tyr. The sequences of the oligonucleotides used for the mutagenesis reactions are listed in Table 8.

[0840] For protein expression, 0.5 L of TB medium was inoculated with a 5 mL starter culture. The culture was agitated at 300 rpm and maintained at 37° C. After reaching an optical density of 0.5 at 600 nm, the culture was induced by the addition of IPTG to a final concentration of 1 mM and the temperature was reduced to 30° C. The culture was shaken for another 16 hours at 300 rpm and the bacterial cells were harvested by centrifugation (15 min at 3400 rpm). Prior to use, the cell pellet was stored at −20° C.

[0841] The frozen pellet was thawed for 10 minutes on ice and re-suspended in a buffer containing 50 mM Tris/HCl (pH 8), 300 mM NaCl, 10 mM imidazole, 1 U/mL DNase I, and Complete™ EDTA-free protease inhibitor cocktail tablets (Roche) (3 mL of buffer per g wet weight of cells). Cell lysis was induced by sonication for 3 min on ice, with intervals of 0.5 sec on and 0.5 sec off. After incubation for another 10 min on ice, the lysate was centrifuged at 40,000×g for 30 min at 4° C. The His₆-tagged Sfp mutant R4-4 (‘His₆’ disclosed as SEQ ID NO: 1106) was then captured by the addition of 2 mL of 50% Ni-NTA slurry (Qiagen) to the cleared lysate. After shaking for 1 hour at 4° C., the resin-lysate mixture was poured into a disposable column (Bio-Rad). The flowthrough was collected and the settled resin was washed with 50 column volumes of 50 mM Tris, 300 mM NaCl, 20 mM imidazole (pH 8.0) and eluted with 5 column volumes of 50 mM Tris, 300 mM NaCl, 250 mM imidazole (pH 8.0). After buffer-exchanging the eluate into TEV protease cleavage buffer containing 50 mM Tris/HCl, 50 mM NaCl (pH 8.0) using a PD-10 column, His₆ tag (SEQ ID NO:1106) removal was carried out by digestion with 7% (w/w) TEV protease at 23° C. for 1 hour and then at 4° C. for 16 hours.

[0842] The TEV-digested Sfp mutant R4-4 was then reloaded onto a Ni-NTA column (1 mL bed volume), which was equilibrated with 1×PBS (pH 7.2). The cleaved enzyme was collected from the column flow-through and from a washing step involving 5 column volumes of 50 mM Tris, 300 mM NaCl, 20 mM imidazole (pH 8.0). The purified Sfp mutant R4-4 was then buffer-exchanged against 10 mM Tris/HCl, 1 mM EDTA, 10% glycerol (pH 7.5) using PD-10 columns. According to Bradford assay using BSA as standard, the enzyme had a final concentration of 3.1 mg/mL at a final volume of 17 mL, which corresponds to 105 mg of TEV-cleaved R4-4 mutant per liter culture. Finally, the enzyme was aliquoted into 100 to 1000 μL fractions, flash-frozen in liquid nitrogen, and stored at −80° C. The purity of the enzyme was assessed by SDS-PAGE analysis and His₆ tag (SEQ ID NO:1106) removal was verified by ESI-MS.

### AcpS

[0843] Using standard molecular biology methods, we cloned the acpS gene from E. coli K-12 into a pET22b vector that allows expression of the recombinant enzyme with a C-terminal His6 tag (SEQ ID NO:1106). The sequences of the oligonucleotides used for cloning are listed in Table 8.

[0844] Following inoculation from a saturated 5 mL starter culture, the AcpS enzyme was expressed in 1 L of TB medium. After shaking the culture at 37° C. with 300 rpm, protein production was induced by the addition of 1 mM IPTG at an optical density of 0.5 (600 nm). Protein expression was carried out overnight at 30° C. and 300 rpm. The next day, the cells were harvested by centrifugation at 3400 rpm for 15 min. The cell pellet was stored at −20° C. prior to protein purification.

[0845] To initiate protein purification, the frozen pellet was thawed for 10 min on ice and resuspended in buffer (3 mL of buffer per g wet weight of cells) containing 50 mM Tris/HCl (pH 8), 300 mM NaCl, 10 mM imidazole, 1 U/mL DNase I, and Complete™ EDTA-free protease inhibitor cocktail tablets (Roche). Cell lysis was achieved by sonicating the cell suspension on ice for 3 min with intervals of 0.5 sec on and 0.5 sec off. After another incubation period of 10 min on ice, the lysate was centrifuged at 40,000 g for 30 min at 4° C. Then 2 mL of 50% Ni-NTA slurry was added to the cleared lysate and the lysate/resin mixture was shaken for 1 hour at 4° C. The lysate/resin mixture was poured into a disposable column. After collecting the flowthrough, the Ni-NTA column was washed with 50 column volumes of buffer containing 50 mM Tris (pH 8), 300 mM NaCl, and 20 mM imidazole. Elution was performed with 5 column volumes of buffer containing 50 mM Tris (pH 8), 300 mM NaCl, and 250 mM imidazole. Using a 3.5 kDa cut-off dialysis cassette (Slide-A-Lyzer, Thermo Scientific), the eluate was dialyzed overnight into buffer containing 50 mM Tris (pH 8), and 300 mM NaCl. Precipitated protein was removed by using a 0.45 μm filter (Millipore). After addition of glycerol to a final concentration of 10% (v/v), the Ni-NTA-purified protein was flash-frozen in liquid nitrogen and stored at −80° C. (100 and 200 μL aliquots). The purity of AcpS was assessed by SDS-PAGE and the yield was quantified by Bradford assay using BSA as standard. About 13 mg of AcpS enzyme was obtained per liter culture.

T. maritima PPTase

[0846] T. maritima PPTase expression was carried out at a 1 L scale in native FM medium by inoculation with a 10 mL saturated starter culture. The 1 L culture was shaken at 300 rpm at a temperature of 37° C. After 2.5 hours, the culture reached an optical density of 0.5 at 600 nm. Protein production was induced by the addition of arabinose to a final concentration of 0.1% (w/v) and the culture was shaken for an additional 4 hours. Cells were harvested by centrifugation at 4000 rpm for 15 minutes and the cell pellets were stored at −20° C. Initial purification of T. maritima PPTase was performed by IMAC (immobilized metal affinity chromatography) using Ni-NTA agarose resin (Qiagen). Cell pellets were thawed and resuspended in 60 mL lysis buffer (40 mM Tris buffer (pH 8.0), 300 mM NaCl, 10 mM Imidazole, 1 mM TCEP). The cell suspension was sonicated on ice for 1.5 minutes (using 1 sec pulses) and centrifuged at 15000 rpm for 30 minutes at 5° C. The cleared lysate was loaded onto a 1.5 mL Ni-NTA column. After collecting the flowthrough, the column was washed with 5 column volumes of wash buffer (40 mM Tris buffer (pH 8.0), 300 mM NaCl, 40 mM imidazole, 10% glycerol, 1 mM TCEP). Protein elution was carried out with 2 column volumes of elution buffer (20 mM Tris buffer (pH 8.0), 150 mM NaCl, 300 mM Imidazole, 1 mM TCEP).

[0847] The Ni-NTA eluate was further purified using a Superdex 75 column (GE Healthcare) connected to an Akta FPLC system. Size-exclusion chromatography (SEC) was performed at flow rate of 1 mL/min in 10 mM Tris buffer (pH 7.4) supplemented with 1 mM EDTA and 10% (v/v) glycerol. After analyzing protein-containing fractions by SDS-PAGE, fractions containing the T. maritima PPTase were pooled and dialyzed again against the buffer previously used for SEC. The purified enzyme was then concentrated using an Amicon Ultra-15 Centrifugal Filter Unit (Millipore) with a 10 kDa cut-off. Precipitate was removed by centrifugation at 13000 rpm for 2 min using a table top centrifuge. The concentrated protein (1.0 mg/mL, 48 μM) was aliquoted into 100 μL fractions, flash-frozen in liquid nitrogen, and stored at minus 80° C. The purity of T. maritima PPTase was assessed by SDS-PAGE and the yield was quantified by Bradford assay using BSA as standard. After all purification steps, 1.4 mg of AcpS enzyme was obtained per liter culture.

### Example 5

### Synthesis of Coenzyme A (CoA) Analogs

### CoA-Maleimidoethylamido-Tetramethylrhodamine

[chemical structure]

[0849] Tetramethylrhodamine-C2-maleimide (5.5 mg, 10.4 mmol) dissolved in 300 μL of DMSO was added to CoA (10.4 μmol in 150 μL water) in 750 μL of 10×PBS buffer and stirred at 23° C. for 1 hour. After the reaction, the reaction mixture was lyophilized to obtain the crude product, which was purified by RP-C18 flash chromatography. Fractions of the desired product were combined and lyophilized to afford CoA-maleimidoethylamido-tetramethylrhodamine (9.8 mg with 94.4% purity) as a dark purple powder. ESI-MS calculated for C₅₂H₆₄N₁₁O₂₂P₃S [MH]⁺: 1320.3; observed: 1320.3.

### CoA-Maleimidocaproyl (MC)-MMAF

[chemical structure]

[0851] MC-MMAF (see Doronina et al., Bioconj. Chem. 17:114-124 (2006)) (36.0 mg, 38.9 μmol) dissolved in 1.8 mL of DMSO was added to CoA (39.0 μmol in 312 μL water) in 2.9 mL of 10×PBS buffer and stirred at 23° C. for 1 hour. After the reaction, the reaction mixture was lyophilized to obtain the crude material, which was purified by RP-C18 flash chromatography. Fractions of the desired product were combined and lyophilized to afford CoA-MC-MMAF (35.5 mg with 97.5% purity) as a white powder. ESI-MS calculated for C₇₀H₁₁₂N₁₃O₂₇P₃S [MH]⁺: 1691.7; observed: 1691.2.

### CoA-MC-Val-Cit-PABC-MMAF

[chemical structure]

[0853] MC-Val-Cit-PABC-MMAF (see Doronina et al., Bioconj. Chem. 17:114-124 (2006)) (5.7 mg, 4.3 mmol) dissolved in 300 μL of DMSO was added to CoA (4.3 μmol in 34 μL water) in 2666 μL of 10×PBS buffer and stirred at 23° C. for 1 hour. After the reaction, the reaction mixture was lyophilized to obtain the crude material, which was purified by RP-C18 flash chromatography. Fractions of the desired product were combined and lyophilized to afford CoA-MC-Val-Cit-PABC-MMAF (6.1 mg with 98.0% purity) as a white powder. ESI-MS calculated for C₈₉H₁₃₉N₁₈O₃₂P₃S [MH₂]²⁺/2: 1049.4; observed: 1049.4.

### CoA-Ac-Ahx-M MAF

[chemical structure]

[0855] Bromoacetyl-Ahx-MMAF (see, Alley et al., Bioconj. Chem. 19:759-765 (2008)) (1.3 mg, 1.4 μmol) dissolved in 400 μL of DMSO was added to CoA (5.4 μmol in 43 μL water) in 3.6 mL of borate buffer (6.7 mM at pH 8.5) and stirred at 23° C. for 24 hours. After the reaction, the reaction mixture was lyophilized to obtain the crude material, which was purified by RP-C18 flash chromatography. Fractions of the desired product were combined and lyophilized to afford CoA-Ac-Ahx-MMAF (1.1 mg with 96.9% purity) as a white powder. ESI-MS calculated for C₆₈H₁₁₂N₁₃O₂₆P₃S [MH]⁺: 1651.7; observed: 1651.3.

### CoA-Open-Ring-MC-MMAF

[chemical structure]

[0857] CoA-MC-MMAF (5 μmol in 1 mL of water) was added to 9 mL of 1 M NH₄OH_{(aq)} and stirred at 23° C. for 30 minutes. After the reaction, the reaction mixture was lyophilized to obtain the crude material, which was purified by RP-C18 flash chromatography. Fractions of the desired product were combined and lyophilized to afford 3.9 mg of maleimide-ring-opened CoA-MC-MMAF as a mixture of four positional and diastereomeric isomers as shown in the scheme above (white powder, 96.6% purity). ESI-MS calculated for C₇₀H₁₁₄N₁₃O₂₈P₃S [MH]⁺: 1709.7; observed: 1709.2.

### Example 6

### Labeling of Peptide-Tagged IgGs with CoA Analogues In Vitro

[0858] To exemplify the single-step conjugation of CoA analogues to peptide-tagged IgGs in vitro, various peptide-tagged Trastuzumab constructs were reacted with CoA-MC-MMAF in the presence of Sfp enzyme. Generally, conjugation reactions were carried out in 50 or 75 mM HEPES or Tris buffer, pH 7.5 or 8.0 supplemented with 10.0 or 12.5 mM MgCl₂. The final concentration of peptide-tagged Trastuzumab was kept constant at 2.5 μM, which corresponds to 5.0 μM per peptide tag, while the final concentration of the CoA substrates was usually varied between 40 μM and 100 μM. To initiate the conjugation reaction, Sfp enzyme was added to give a final concentration of typically 1 μM. The enzymatic reaction was allowed to proceed at either 23° C. or 37° C. for 16 hours. After this time period, the reaction progress was analyzed by ESI-MS and HPLC.

### Example 7

### Labeling of Insertions

[0859] Nearly quantitative conjugation of CoA-MC-MMAF to six Trastuzumab antibodies and one 2^{nd} antibody (“mAb2”) against a different target with inserted S6- or ybbR-tags was accomplished by incubating reaction mixtures with Sfp as described in Example 6. HPLC of single-step conjugation reaction mixtures (Table 10) of anti-hHER2-HC-T359-GDSLSWLLRLLN-K360 (SEQ ID NO:121, FIG. 5A), anti-hHER2-HC-E388-GDSLSWLLRLLN-N389 (SEQ ID NO:127, FIG. 5B), anti-hHER2-HC-V2-DSLEFIASKLA-Q3 (SEQ ID NO:95, FIG. 5C), anti-hHER2-HC-V2-GDSLSWLLRLLN-Q3 (SEQ ID NO:94, FIG. 5D), anti-hHER2-HC-E388-DSLEFIASKL-N389 (SEQ ID NO:130, FIG. 5E), anti-hHER2-HC-E388-DSLEFIASKLA-N389 (SEQ ID NO: 129, FIG. 5F), and mAb2-HC-T359-GDSLSWLLRLLN-K360 (SEQ ID NO:148, FIG. 5G) indicate near complete conversion of the tagged antibodies into an immunoconjugate with an approximate drug-to-antibody-ratio (DAR) of 2. ESI-MS of reduced conjugate samples suggest site-specific modification of only the heavy chain as designed. For anti-hHER2-LC-I2-DSLEFIASKLA-Q3 (SEQ ID NO:27, FIG. 5H), HPLC suggests only partial formation of the immunoconjugate as significant amounts of unmodified antibody (39%, retention time 4.8 mins) remain and a mixture of DAR=1 (46%, retention time 5.4 mins) and DAR=2 (16%, retention time 5.9 mins) species is observed.

TABLE 10
MS and HPLC analysis of conjugation reactions with inserted tags:

| | Antibody construct | | | | |
|---|---|---|---|---|---|
| | (whole antibody tested, | | | | |
| | the name represents part | | | Expected | |
| | of the HC or LC that | | | mass | |
| | contains the peptide tag, | | Expected mass | unmodified | DAR = 2 |
| SEQ ID | the paired wildtype chain | Observed | immunoconjugate | antibody | according |
| NO | is not listed) | mass (Da) | (Da) | (Da) | to HPLC |
| 121 | anti-hHER2-HC-T359- | 51785.20 | 51791 | 50525 | 92% |
| | GDSLSWLLRLLN-K360 | | | | |
| 127 | anti-hHER2-HC-E388- | 51786.40 | 51791 | 50525 | 97% |
| | GDSLSWLLRLLN-N389 | | | | |
| 95 | anti-hHER2-HC-V2- | 51588.00 | 51598 | 50332 | 96% |
| | DSLEFIASKLA-Q3 | | | | |
| 94 | anti-hHER2-HC-V2- | 51780.40 | 51791 | 50525 | 100% |
| | GDSLSWLLRLLN-Q3 | | | | |
| 130 | anti-hHER2-HC-E388- | 51517.20 | 51527 | 50261 | 94% |
| | DSLEFIASKL-N389 | | | | |
| 129 | anti-hHER2-HC-E388- | 51588.00 | 51598 | 50332 | 100% |
| | DSLEFIASKLA-N389 | | | | |
| 27 | anti-hHER2-LC-I2- | 25878.40 | 25884 | 24618 | 16% |
| | DSLEFIASKLA-Q3 | | | | |
| 148 | mAb2-HC-T359- | 52848.80 | 52849 | 51597 | 95% |
| | GDSLSWLLRLLN-K360 | (major); | | | |
| | | 51600.40 | | | |
| | | (minor) | | | |

As shown in FIG. 6, the trastuzumab immunoconjugates (A) anti-hHER2-HC-V2-GDS-ppan-MC-MMAF-LSWLLRLLN-Q3 (SEQ ID NO:1120), (B) anti-hHER2-HC-E388-DS-ppan-MC-MMAF-LEFIASKLA-N389 (SEQ ID NO:1122), and (C) anti-hHER2-HC-E388-DS-ppan-MC-MMAF-LEFIASKL-N389 (SEQ ID NO:1121) were analyzed by analytical size-exclusion chromatography (AnSEC) on a Shodex PROTEIN KW-803 column. In all three cases, the ADCs were monomeric (no detectable amounts of aggregated material).

### Example 8

### Labeling of Constructs with Grafted Peptide Tags

[0860] Single-step, in vitro Sfp-catalyzed conjugation of CoA-MC-MMAF to Trastuzumab antibody with a grafted ybbR tag was also attempted. The Sfp-catalyzed reaction of the IgG1 construct anti-hHER2-HC-S190D-S191-S192L-L193E-G194F-T195I-Q196A-T197S-Y198K-I199L (SEQ ID NO:114) was performed as described in Example 6. HPLC (FIG. 7) and ESI-MS analysis of the reaction mixture indicate that the immunoconjugate with MMAF (expected mass conjugate: 50489 Da, expected mass unmodified antibody: 49223 Da, observed: 49216.8 Da) was not formed. Other grafted constructs also failed to react and failed to form immunoconjugates.

### Example 9

### Labeling of Mixed Grafting/Insertion Constructs

[0861] Single-step, in vitro Sfp-catalyzed conjugation of CoA-MC-MMAF to Trastuzumab antibodies with grafted/inserted S6- or ybbR-tags was also attempted. Two Trastuzumab mutants anti-hHER2-HC-V64L-EFIASKLA-K65 (SEQ ID NO:99) and anti-hHER2-LC-S76D-S77-L78-EFIASKLA-Q79 (SEQ ID NO:30) were reacted with CoA-MC-MMAF and Sfp as described in Example 6. While anti-hHER2-HC-V64L-EFIASKLA-K65 (SEQ ID NO:99) is partially modified as indicated by HPLC of the reaction mixture (FIG. 8A), anti-hHER2-LC-S76D-S77-L78-EFIASKLA-Q79 (SEQ ID NO:30) (FIG. 8B) failed to react under identical conditions (Table 11).

TABLE 11
ESI-MS results of conjugation reactions with mixed grafted/inserted tags:

| | Antibody construct | | | | |
|---|---|---|---|---|---|
| | (whole antibody | | | | |
| | tested, the name | | | | |
| | represents part of the | | | | |
| | HC or LC that contains | | | Expected | |
| | the peptide tag, the | Observed | Expected mass | mass | DAR = 2 |
| | paired wildtype chain | mass | immunoconjugate | unmodified | according |
| SEQ ID NO | is not listed) | (Da) | (Da) | antibody (Da) | to HPLC |
| 99 | anti-hHER2-HC- | 51287.20 | 51297 | 50031 | 32% |
| | V64L-EFIASKLA-K65 | | | | |
| 30 | anti-hHER2-LC- | 24324.80 | 25597 | 24331 | 0% |
| | S76D-S77-L78- | | | | |
| | EFIASKLA-Q79 | | | | |

### Example 10

### Labeling with Fluorescent Dyes

[0862] To extend enzymatic antibody labeling beyond the site-specific attachment of cytotoxins, we demonstrate the feasibility of Sfp-catalysis to generate antibody-fluorophore conjugates. This example represents two Sfp-catalyzed conjugations of CoA-tetramethylrhodamine (CoA-TMR) to Trastuzumab antibodies with either grafted or inserted S6 tags performed as described in Example 6. HPLC traces of reaction mixtures were monitored at both 280 nm and 555 nm (FIG. 9). The latter wavelength is near the absorption maximum of the TMR dye (˜550 nm).

[0863] Furthermore, the data of the deconvoluted mass spectra of the antibody-fluorophore conjugates is summarized in Table 12.

[0864] For the anti-hHER2-HC-P189G-S190D-S191-S192L-L193S-G194W-T195L (SEQ ID NO:109) that contains a truncated grafted S6 tag, conjugation resulted primarily in the formation of a two-dye per antibody conjugate (FIG. 9A). Likewise, the anti-hHER2-HC-T359-GDSLSWLLRLLN-K360 (SEQ ID NO:121) with a full-length S6 tag inserted between residue T359 and K360 showed predominantly conjugation of two dye molecules to each antibody (FIG. 9B). The results illustrate the S6 tags can be used for conjugation of fluorescent labeling of modified antibodies.

TABLE 12
ESI-MS results of the conjugation reactions with a fluorescent dye:

| | Antibody construct (whole | | | |
|---|---|---|---|---|
| | antibody tested, the name | | | |
| | represents part of the HC or LC | | | |
| | that contains the peptide tag, | | Expected mass | Expected mass |
| | the paired wildtype chain is | Observed | fluorophore | unmodified |
| SEQ ID NO | not listed) | mass (Da) | conjugate (Da) | antibody (Da) |
| 109 | anti-hHER2-HC-P189G- | 50177.20 | 50180 | 49286 |
| | S190D-S191-S192L-L193S- | | | |
| | G194W-T195L | | | |
| 121 | anti-hHER2-HC-T359- | 51422.00 | 51419 | 50525 |
| | GDSLSWLLRLLN-K360 | | | |

### Example 11

### Near Quantitative Labeling with Cytotoxins Linked Through Thioether or Hydrolyzed Maleimide Linkage

[0865] Although not observed for conjugates of the invention, maleimide-linked payloads may undergo deconjugation in plasma via maleimide exchange with reactive thiols of albumin, glutathione, and cysteine (Alley et al., Bioconjugate Chem. 2008, 19, 759-765). Maleimide-based conjugates can be stabilized through chemical ring-opening of the maleimidocaproyl linkage (see, Shen et al., Nature Biotech. 30:184-189 (2012)). To test this hydrolysis procedure, the respective ADC of anti-hHER2-HC-T359-GDSLSWLLRLLN-K360 (SEQ ID NO:121) was prepared using CoA-open-ring-MC-MMAF. Moreover, to test alternative thiol-reactive chemistries, we attached the MMAF cytotoxin to the terminal thiol of CoA via an acetamide-based thioether linkage resulting in CoA-Ac-Ahx-MMAF (see, Alley et al., Bioconj. Chem. 19:759-765 (2008)). The ESI-MS and HPLC results of these enzymatic conjugation reactions (according to the protocol described in Example 6) are summarized in Table 13. Near quantitative labeling with DAR=2 was observed for anti-hHER2-HC-T359-GDSLSWLLRLLN-K360 (SEQ ID NO: 121) reacted with CoA-open-ring-MC-MMAF (FIG. 10A) and anti-hHER2-HC-T359-GDSLSWLLRLLN-K360 (SEQ ID NO:121) reacted with CoA-Ac-Ahx-MC-MMAF (FIG. 10B).

TABLE 13
ESI-MS results of the conjugation reactions with alternative linkers:

| SEQ ID NO of the | | | | | |
|---|---|---|---|---|---|
| antibody (whole | | | | | |
| antibody tested, the | | | | | |
| name represents part | | | | | |
| of the HC or LC that | | | | Expected | |
| contains the peptide | | | | mass | |
| tag, the paired | | | Expected mass | unmodified | DAR = 2 |
| wildtype chain is not | CoA | Observed | immunoconjugate | antibody | according |
| listed) | substrate | mass (Da) | (Da) | (Da) | to HPLC |
| 121 | maleimide- | 51802.00 | 51809 | 50525 | 85% |
| | ring-opened | | | | |
| | CoA-MC- | | | | |
| | MMAF | | | | |
| 121 | CoA-Ac-Ahx- | 51742.40 | 51750 | 50525 | 80% |
| | MMAF | | | | |

### Example 12

### Near Quantitative Labeling with Cytotoxin with Cleavable Linker

[0866] To demonstrate the labeling of peptide-tagged IgGs with cytotoxins that are attached via cleavable linkers, we conjugated CoA-MC-Val-Cit-PABC-MMAF containing the cathepsin B-sensitive valine-citrulline linker to either anti-hHER2-HC-T359-GDSLSWLLRLLN-K360 (SEQ ID NO:121) (FIG. 11A) or anti-hHER2-HC-E388-GDSLSWLLRLLN-N389 (SEQ ID NO:127) (FIG. 11B) in the presence of Sfp. HPLC and ESI-MS results of this single-step enzymatic conjugation are summarized in Table 14 and indicate near quantitative labeling with a DAR=2 for both tag positions.

TABLE 14
ESI-MS results of the conjugation reactions with CoA-MC-Val-Cit-PABC-MMAF:

| | | | Expected mass | Expected mass | DAR = 2 |
|---|---|---|---|---|---|
| | Antibody | Observed | immunoconjugate | unmodified | according to |
| SEQ ID NO | construct | mass (Da) | (Da) | antibody (Da) | HPLC |
| 121 | anti-hHER2- | 52189.60 | 52196 | 50525 | 91% |
| | HC-T359- | | | | |
| | GDSLSWLL | | | | |
| | RLLN-K360 | | | | |
| 127 | anti-hHER2- | 52188.40, | 52196 | 50525 | 95% |
| | HC-E388- | 51412.40 | | | |
| | GDSLSWLL | | | | |
| | RLLN-N389 | | | | |

### Example 13

### Optimization of Labeling Reaction as a Function of pH

[0867] The purpose of this experiment was to determine the optimal pH range for Sfp-catalyzed conjugation of CoA substrates to peptide-tagged antibodies. In three experiments, 2.5 μM of anti-hHER2-HC-E388-GDSLSWLLRLLN-N389 (SEQ ID NO:127) or 2.5 μM of anti-hHER2-HC-T359-GDSLSWLLRLLN-K360 (SEQ ID NO:121) were reacted with 10 μM of CoA-MC-MMAF in the presence of 0.25 μM of Sfp (for anti-hHER2-HC-E388-GDSLSWLLRLLN-N389 (SEQ ID NO:127)) or 1.0 μM of Sfp (for anti-hHER2-HC-T359-GDSLSWLLRLLN-K360 (SEQ ID NO:121)), and the pH was titrated from pH 5.0 to 10.0. In order to cover this pH range, five buffers were utilized: 75 mM sodium acetate buffer for pH 5.0; 75 mM MES buffer for pH 5.5, 6.0, and 6.5; 75 mM HEPES buffer for pH 7.0, 7.5, and 8.0; 75 mM sodium borate buffer for pH 9.0; 75 mM sodium carbonate buffer for pH 10.0. All buffers were supplemented with 12.5 mM of MgCl₂ to ensure enzyme activity. The pH titration series was performed at 23° C. for 25 to 35 min in a volume of 100 μL for each reaction. After quenching the enzymatic reaction by the addition of 30 μL of 4% (v/v) trifluoroacetic acid (TFA), reaction mixtures were analyzed by HPLC at 280 nm as summarized in Table 15.

TABLE 15
HPLC results of labeling reactions as a function of pH:

| | Antibody construct (whole | | | | |
|---|---|---|---|---|---|
| | antibody tested, the name | | | | |
| | represents part of the HC or LC | | | | |
| | that contains the peptide tag, | | | | |
| | the paired wildtype chain is not | | | | |
| SEQ ID NO | listed) | pH value | DAR = 0 | DAR = 1 | DAR = 2 |
| 127 | anti-hHER2-HC-E388- | 5.0 | 100%; 100% | 0%; 0% | 0%; 0% |
| | GDSLSWLLRLLN-N389 | | | | |
| 121 | anti-hHER2-HC-T359- | | 100% | 0% | 0% |
| | GDSLSWLLRLLN-K360 | | | | |
| 127 | anti-hHER2-HC-E388- | 5.5 | 100% | 0% | 0% |
| | GDSLSWLLRLLN-N389 | | | | |
| 127 | anti-hHER2-HC-E388- | 6.0 | 88%; 90% | 12%; 10% | 0%; 0% |
| | GDSLSWLLRLLN-N389 | | | | |
| 121 | anti-hHER2-HC-T359- | | 100% | 0% | 0% |
| | GDSLSWLLRLLN-K360 | | | | |
| 127 | anti-hHER2-HC-E388- | 6.5 | 68% | 23% | 9.2% |
| | GDSLSWLLRLLN-N389 | | | | |
| 127 | anti-hHER2-HC-E388- | 7.0 | 25%; 26% | 48%; 44% | 28%; 31% |
| | GDSLSWLLRLLN-N389 | | | | |
| 121 | anti-hHER2-HC-T359- | | 77% | 23% | 0% |
| | GDSLSWLLRLLN-K360 | | | | |
| 127 | anti-hHER2-HC-E388- | 7.5 | 12% | 41% | 47% |
| | GDSLSWLLRLLN-N389 | | | | |
| 127 | anti-hHER2-HC-E388- | 8.0 | 7.7%; 11% | 36%; 36% | 56%; 52% |
| | GDSLSWLLRLLN-N389 | | | | |
| 121 | anti-hHER2-HC-T359- | | 52% | 37% | 11% |
| | GDSLSWLLRLLN-K360 | | | | |
| 127 | anti-hHER2-HC-E388- | 9.0 | 12% | 31% | 57% |
| | GDSLSWLLRLLN-N389 | | | | |
| 121 | anti-hHER2-HC-T359- | | 32% | 46% | 23% |
| | GDSLSWLLRLLN-K360 | | | | |
| 127 | anti-hHER2-HC-E388- | 10.0 | 100% | 0% | 0% |
| | GDSLSWLLRLLN-N389 | | | | |
| 121 | anti-hHER2-HC-T359- | | 53% | 36% | 11% |
| | GDSLSWLLRLLN-K360 | | | | |

[0868] The HPLC results indicate that the pH range 8 to 9 is optimal for the conjugation of CoA-MC-MMAF to peptide-tagged Trastuzumab. In this pH range, the lowest amount of uncoupled antibody (DAR=0) and the highest amount of bi-conjugated ADC (DAR=2) could be detected by HPLC. Furthermore, plotting the percentage of ADC with a DAR of 2 against the pH (FIG. 12) indicates that the pH optimum is independent of the insertion site of the S6 tag for the two sites tested.

### Example 14

### Optimization of Labeling Reaction as a Function of Enzyme Concentration

[0869] To test the amount of Sfp required for efficient enzymatic conjugation, 2.5 μM of anti-hHER2-HC-E388-GDSLSWLLRLLN-N389 (SEQ ID NO: 127) was incubated at 37° C. for 16 hours with 50 μM CoA-MC-MMAF in 50 mM HEPES buffer (pH 7.5) supplemented with 10 mM MgCl₂ in the presence of no Sfp enzyme or 0.1, 0.25, 0.5, 1, 2.5, 5 or 10 μM Sfp enzyme. After 16 hours, aliquots of the reaction were analyzed by ESI-MS. For Sfp concentrations of 0.1 μM, mainly non-conjugated modified antibody is detectable by ESI-MS (FIG. 13A). Quantitative conjugation was obtained for all Sfp concentrations equal (FIG. 13B) or greater than 0.25 μM, such as 0.5 μM of Sfp (FIG. 13C).

### Example 15

### Optimization of Labeling Reaction as a Function of CoA Analogue

[0870] To determine the minimal concentration of CoA substrate that would be required for quantitative labeling of an peptide-tagged IgG1 antibody, 2.5 μM anti-hHER2-HC-E388-GDSLSWLLRLLN-N389 (SEQ ID NO:127) was incubated with 0.25 μM or 1.0 μM Sfp in 75 mM Tris buffer (pH 8.0) containing 12.5 mM MgCl₂ and supplemented with CoA-MC-MMAF at the following concentrations: 2.5, 5, 7.5, 10, 15, 25, and 50 μM. The reaction was allowed to proceed for 13 hours at 23° C. and then quenched with 30 μL of 4% (v/v) trifluoroacetic acid (TFA). According to HPLC analysis (FIGS. 14A and 14B, Table 16), nearly quantitative antibody conjugation was achieved for all CoA-MC-MMAF concentrations equal or higher than 7.5 μM. The degree of labeling was almost independent on the Sfp concentration, with 86% DAR 2 species observed at 0.25 μM Sfp and 92% DAR 2 species observed at 1.0 μM Sfp.

TABLE 16
HPLC results of labeling reactions as a function of CoA concentration:

| | | Retention time | | |
|---|---|---|---|---|
| | | 4.9 min | 5.3 min | 5.7 min |
| CoA-MC-MMAF (μM) | Sfp (μM) | DAR = 0 | DAR = 1 | DAR = 2 |
| 50 | 0.25 | 3.8% | 7.1% | 89% |
| 25 | 0.25 | 3.7% | 7.0% | 89% |
| 15 | 0.25 | 3.2% | 6.9% | 90% |
| 10 | 0.25 | 3.9% | 7.2% | 89% |
| 7.5 | 0.25 | 5.0% | 8.6% | 86% |
| 5 | 0.25 | 5.7% | 20.5% | 74% |
| 2.5 | 0.25 | 28% | 48.3% | 24% |
| 50 | 1.0 | — | 7.1% | 93% |
| 25 | 1.0 | — | 6.3% | 94% |
| 15 | 1.0 | — | 5.7% | 94% |
| 10 | 1.0 | — | 5.7% | 94% |
| 7.5 | 1.0 | 1.0% | 6.7% | 92% |
| 5 | 1.0 | 2.8% | 24% | 73% |
| 2.5 | 1.0 | 31% | 48% | 21% |

[0871] To determine the aggregation state of the anti-hHER2-HC-E388-GDS-MC-MMAF-LSWLLRLLN-N389 (SEQ ID NO:1129) immunoconjugate, 5.6 mg of anti-hHER2-HC-E388-GDSLSWLLRLLN-N389 (SEQ ID NO:127) (2.5 μM) were reacted with 40 μM CoA-MC-MMAF in the presence of 1 μM Sfp in 50 mM HEPES buffer (pH 7.5) supplemented with 10 mM MgCl₂. After incubation at 23° C. for 3 days, the reaction mixture was purified on a Sephacryl 100-HR size-exclusion column (Sigma). After confirming quantitative conjugation by ESI-MS (observed mass, 51786.40 Da; expected mass immunoconjugate, 51791 Da; expected mass unmodified antibody, 50525 Da), the quaternary structure of the respective ADC was analyzed on a Tricorn S200 column (Agilent). The ADC was primarily monomeric (98%) and contained trace amounts of an oligomerized species (2%).

### Example 16

### Thermal Stability of S6 Antibodies and ADCs

[0872] To examine the thermal stability of peptide-tagged immunoconjugates, purified ADC samples were measured by differential scanning fluorometry (DSF) (Table 17) or differential scanning calorimetry (DSC) (Table 18). Samples were diluted to a final concentration of 0.25 mg/mL (1.67 μM) in PBS, pH 7.4. For DSF, SYPRO Orange gel stain (Sigma) was added to a final concentration of 5× as the tracer to indicate thermal unfolding of the ADCs. Samples were heated with 20 fluorescence scans/degree in a Lightcycler (Roche) instrument. For DSC, thermal unfolding was monitored by measuring heat capacity as temperature was increased at a rate of 1 degree Celsius per min in a MicroCal VP-DSC instrument. Melting temperatures were calculated using in the respective controller software packages assuming a 3-state model.

[0873] As described previously (Wakankar et al. Bioconjugate Chem. 2010, 21, 1588-1595), unmodified trastuzumab exhibits two transitions. The transitions were observed at 69.7 and 81.1 degrees Celsius by DSF and 72.3 and 81.0 degrees Celsius by DSC. Similar to the unmodified antibody, most CoA-MC-MMAF immunoconjugates exhibit two transitions although with different amplitudes (FIG. 15). DSF and DSC measurements of thermal melting points agree well although DSF reports a roughly 2 degree lower first transition. Generally, most engineered, non-conjugated antibodies and the respective peptide-tagged ADCs show little destabilization as compared to the wild-type antibody anti-hHER2.

TABLE 17
Thermal stability as measured by DSF. ΔTm values are relative to unmodified
anti-hHER2 antibody.

| | Sample (whole antibody tested, the name | | | | |
|---|---|---|---|---|---|
| | represents part of the HC or LC that | | | | |
| SEQ ID | contains the peptide tag, the paired | | | | |
| NO | wildtype chain is not listed) | Tm₁/° C. | Tm₂/° C. | ΔTm₁/° C. | ΔTm₂/° C. |
| 93/25 | anti-hHER2 | 69.7 | 81.2 | | |
| 94 | anti-hHER2-HC-V2-GDSLSWLLRLLN-Q3 | 70.8 | — | 1.1 | — |
| 95 | anti-hHER2-HC-V2-DSLEFIASKLA-Q3 | 70.0 | 78.0 | 0.3 | −3.1 |
| 102 | anti-hHER2-HC-S132D-K133S-S134L-T135E- | 69.3 | — | −0.4 | — |
| | S136F-G137I-G138A-T139S-A140K-A141L- | | | | |
| | L142A | | | | |
| 103 | anti-hHER2-HC-K133G-S134D-T135S-S136L- | 68.4 | 81.0 | −1.3 | −0.1 |
| | G137S-G138W-LLRLLN-T139 | | | | |
| 109 | anti-hHER2-HC-P189G-S190D-S191-S192L- | 69.6; | 81.0; | −0.1; | −0.1; |
| | L193S-G194W-T195L | 69.3 | 80.6 | −0.4 | −0.5 |
| 110 | anti-hHER2-HC-P189G-S190D-S191-S192L- | 69.4 | 80.7 | −0.3 | −0.4 |
| | L193S-G194W-T195L-LRLLN-Q196 | | | | |
| 112 | anti-hHER2-HC-P189D-S190-S191L-S192E- | 69.4 | 78.6 | −0.3 | −2.5 |
| | L193F-G194I-T195A-Q196S-T197K-Y198L- | | | | |
| | I199A | | | | |
| 113 | anti-hHER2-HC-S190G-S191D-S192-L193- | 68.1 | 78.1 | −1.7 | −3.1 |
| | G194S-T195W-Q196L-T197L-RLLN-Y198 | | | | |
| 114 | anti-hHER2-HC-S190D-S191-S192L-L193E- | 67.8 | — | −1.9 | — |
| | G194F-T195I-Q196A-T1975-Y198K-I199L | | | | |
| 115 | anti-hHER2-HC-S190D-S191-S192L-L193E- | 67.1 | — | −2.6 | — |
| | G194F-T195I-Q196A-T197S-Y198K-I199L- | | | | |
| | C200A | | | | |
| 116 | anti-hHER2-HC-S191D-S192-L193-G194E- | 69.3 | — | −0.4 | — |
| | T195F-Q196I-T197A-Y1985-I199K | | | | |
| 121 | anti-hHER2-HC-T359-GDSLSWLLRLLN-K360 | 70.1; | 81.7; | 0.3; | 0.6; |
| | | 70.3 | 81.7 | 0.5 | 0.6 |
| 1117 | anti-hHER2-HC-T359-GDS-ppan-MC-MMAF- | 68.4; | 81.5; | −1.3; | 0.4; |
| | LSWLLRLLN-K360 | 68.6 | 81.4 | −1.2 | 0.3 |
| 122 | anti-hHER2-HC-T359-DSLEFIASKLA-K360 | 70.1 | 81.7 | 0.3 | 0.6 |
| 127 | anti-hHER2-HC-E388-GDSLSWLLRLLN-N389 | 66.6 | 81.5 | −3.1 | 0.4 |
| 1118 | anti-hHER2-HC-E388-GDS-ppan-MC-MMAF- | 66.3 | 81.0 | −3.4 | −0.1 |
| | LSWLLRLLN-N389 | | | | |
| 1107 | anti-hHER2-HC-E388-GDS-ppan-MC-ValCit- | 66.7 | 80.9 | −3.0 | −0.2 |
| | PABC-MMAF-LSWLLRLLN-N389 | | | | |
| 131 | anti-hHER2-HC-E388-DSLEFIASK-N389 | 69.4 | 81.6 | −0.3 | 0.5 |
| 130 | anti-hHER2-HC-E388-DSLEFIASKL-N389 | 68.9 | 81.5 | −0.9 | 0.4 |
| 129 | anti-hHER2-HC-E388-DSLEFIASKLA-N389 | 69.3 | 81.6 | −0.4 | 0.5 |
| 135 | anti-hHER2-HC-L398D-D399S-S400L-D401E- | 49.2 | 81.2 | −20.6 | 0.1 |
| | G402F-S403I-F404A-F405S-L406K-Y407L- | | | | |
| | S408A | | | | |
| 141 | anti-hHER2-HC-K447-DSLEFIASKLA | 70.1 | 81.0 | 0.4 | −0.1 |
| 27 | anti-hHER2-LC-I2-DSLEFIASKLA-Q3 | 70.0 | 78.8 | 0.2 | −2.3 |
| 29 | anti-hHER2-LC-C214-DSLEFIASKLA | 69.7 | 80.9 | 0.0 | −0.2 |

TABLE 18
Thermal stability as measured by DSC. ΔTm values are relative to unmodified
anti-hHER2 antibody.

| SEQ ID No | | Tm1/ | Tm2/ | Tm3/ | | |
|---|---|---|---|---|---|---|
| (antibody) | Sample | ° C. | ° C. | ° C. | ΔTm1/° C. | ΔTm2/° C. |
| 93/25 | anti-hHER2 | 72.3; | 80.9; | — | | |
| | | 72.3 | 81.0 | | | |
| 95 | anti-hHER2-HC-V2-DSLEFIASKLA- | 72.3 | 77.9 | 83.3 | 0.1 | −3.1 |
| | Q3 | | | | | |
| 1120 | anti-hHER2-HC-V2-GDS-ppan-MC- | 70.4 | 82.6 | — | −1.9 | 1.7 |
| | MMAF-LSWLLRLLN-Q3 | | | | | |
| 102 | anti-hHER2-HC-S132D-K133S- | 70.3 | 76.2 | 83.3 | −2.0 | −4.8 |
| | S134L-T135E-S136F-G137I-G138A- | | | | | |
| | T139S-A140K-A141L-L142A | | | | | |
| 103 | anti-hHER2-HC-K133G-S134D- | 69.7 | 80.5 | — | −2.6 | −0.5 |
| | T135S-S136L-G137S-G138W- | | | | | |
| | LLRLLN-T139 | | | | | |
| 109 | anti-hHER2-HC-P189G-S190D- | 72.8; | 80.1; | — | 0.5; | −0.9; |
| | S191-S192L-L193S-G194W-T195L | 70.7 | 79.9 | | −1.6 | −1.1 |
| 110 | anti-hHER2-HC-P189G-S190D- | 71.2 | 80.0 | — | −1.1 | −1.0 |
| | S191-S192L-L193S-G194W-T195L- | | | | | |
| | LRLLN-Q196 | | | | | |
| 121 | anti-hHER2-HC-T359- | 70.4; | 80.9; | — | −1.9; | 0.1; |
| | GDSLSWLLRLLN-K360 | 70.6 | 80.6 | | −1.6 | −0.4 |
| 1117 | anti-hHER2-HC-T359-GDS-ppan- | 68.7 | 80.6 | — | −3.6 | −0.4 |
| | MC-MMAF-LSWLLRLLN-K360 | | | | | |
| 1117 | anti-hHER2-HC-T359-GDS-ppan- | 68.8 | 80.4 | — | −3.5 | −0.6 |
| | MC-MMAF-LSWLLRLLN-K360 | | | | | |
| 122 | anti-hHER2-HC-T359- | 71.8 | 80.9 | — | −0.5 | −0.1 |
| | DSLEFIASKLA-K360 | | | | | |
| 1118 | anti-hHER2-HC-E388-GDS-ppan- | 67.0 | 80.2 | — | −5.3 | −0.8 |
| | MC-MMAF-LSWLLRLLN-N389 | | | | | |
| 1107 | anti-hHER2-HC-E388-GDS-ppan- | 66.0 | 80.1 | — | −6.3 | −0.9 |
| | MC-ValCit-PABC-MMAF- | | | | | |
| | LSWLLRLLN-N389 | | | | | |
| 131 | anti-hHER2-HC-E388-DSLEFIASK- | 71.2 | 80.8 | — | −1.0 | −0.2 |
| | N389 | | | | | |
| 130 | anti-hHER2-HC-E388- | 70.7 | 80.8 | — | −1.6 | −0.2 |
| | DSLEFIASKL-N389 | | | | | |
| 1121 | anti-hHER2-HC-E388-DS-ppan-MC- | 69.9 | 80.2 | — | −2.3 | −0.8 |
| | MMAF-LEFIASKL-N389 | | | | | |
| 129 | anti-hHER2-HC-E388- | 71.1 | 80.8 | — | −1.2 | −0.2 |
| | DSLEFIASKLA-N389 | | | | | |
| 1122 | anti-hHER2-HC-E388-DS-ppan-MC- | 70.2 | 80.3 | — | −2.1 | −0.7 |
| | MMAF-LEFIASKLA-N389 | | | | | |
| 135 | anti-hHER2-HC-L398D-D399S- | — | 81.0 | — | — | 0.1 |
| | S400L-D401E-G402F-S403I-F404A- | | | | | |
| | F405S-L406K-Y407L-S408A | | | | | |
| 141 | anti-hHER2-HC-K447- | 72.7 | 81.0 | — | 0.4 | 0.1 |
| | DSLEFIASKLA | | | | | |
| 29 | anti-hHER2-LC-C214- | 71.6 | 81.1 | — | −0.7 | 0.1 |
| | DSLEFIASKLA | | | | | |

### Example 17

### Pharmacokinetic Properties of Peptide-Tagged ADCs

[0874] To check the in vivo stability of two peptide-tagged Trastuzumab ADCs with MMAF payload (DAR of 2), we conducted a pharmacokinetic (PK) study in mice. Anti-hHER2-HC-T359-GDS-ppan-MC-MMAF-LSWLLRLLN-K360 (SEQ ID NO:1117) and anti-hHER2-HC-E388-GDS-ppan-MC-MMAF-LSWLLRLLN-N389 (SEQ ID NO:1118) were injected i.v. into 3 mice using ADC concentrations of 1.0 mg/kg. 10 samples were collected at 0.2, 1, 3, 7, 24, 48, 96, 168, 240, and 336 hours. The plasma titers of both ADCs were monitored up to two weeks using ELISA assays with anti-human IgG as well as anti-MMAF antibodies and ELISA plates coated with truncated human HER2 (extracellular domains 3-4). The ELISA results were then compared to PK studies of an unmodified Trastuzumab IgG1. While anti-hHER2-HC-T359-GDS-ppan-MC-MMAF-LSWLLRLLN-K360 (SEQ ID NO:1117) showed a fast decay in mice in comparison to unmodified trastuzumab, anti-hHER2-HC-E388-GDS-ppan-MC-MMAF-LSWLLRLLN-N389 (SEQ ID NO:1118) exhibited a serum clearance similar to unmodified trastuzumab over a two week time period (FIG. 16). For both ADCs, anti-hIgG and anti-MMAF titers track each other, suggesting that little if any drug is lost during the in vivo exposure in mice.

### Example 18

### In Vitro Potency of Peptide-Tagged ADCs

[0875] In vitro cell-killing assays of peptide-tagged ADCs were carried out with the HER2-expressing MDA-231 cell line. ADCs with DAR=2 were prepared as described in Example 6 by reacting anti-hHER2-HC-T359-GDSLSWLLRLLN-K360 (SEQ ID NO:121) and anti-hHER2-HC-E388-GDSLSWLLRLLN-N389 (SEQ ID NO:127) with non-cleavable MC-MMAF and cleavable MC-ValCit-PABC-MMAF (Example 12). The in vitro potency of the corresponding ADCs, anti-hHER2-HC-T359-GDS-ppan-MC-MMAF-LSWLLRLLN-K360 (SEQ ID NO:1117), anti-hHER2-HC-E388-GDS-ppan-MC-MMAF-LSWLLRLLN-N389 (SEQ ID NO:1118), anti-hHER2-HC-T359-GDS-ppan-MC-ValCit-PABC-MMAF-LSWLLRLLN-K360 (SEQ ID NO:1108), and anti-hHER2-HC-E388-GDS-ppan-MC-ValCit-PABC-MMAF-LSWLLRLLN-N389 (SEQ ID NO:1107) were tested in PC₃₋₃₁ (high copy number of HER2) and PC3 (low copy number of HER2) ErbB2 engineered cells. Regarding the PC3-31 cell line, all peptide-tagged ADCs revealed potent cytotoxic activities with half maximal effective concentrations (EC₅₀) in the picomolar range. In contrast, the corresponding EC₅₀ values on PC3 cells were higher than 60 nM. The results are summarized in Table 19 and FIG. 17 and indicate that all four conjugates are highly potent ADCs and kill HER2/neu-positive cells in an antigen-dependent manner.

TABLE 19
In vitro potency of S6-tag conjugated MMAF immunoconjugates.

| | | EC₅₀ value | |
|---|---|---|---|
| SEQ ID NO | ADC | PC3-31 cell line | PC3 cell line |
| 1117 | anti-hHER2-HC-T359-GDS-ppan-MC-MMAF- | 7.9 ng/mL; 53 pM | >9,000 ng/mL; >60 nM |
| | LSWLLRLLN-K360 | | |
| 1118 | anti-hHER2-HC-E388-GDS-ppan-MC-MMAF- | 8.5 ng/mL; 57 pM | >9,000 ng/mL; >60 nM |
| | LSWLLRLLN-N389 | | |
| 1108 | anti-hHER2-HC-T359-GDS-ppan-MC-ValCit- | 7.7 ng/mL; 51 pM | >9,000 ng/mL; >60 nM |
| | PABC-MMAF-LSWLLRLLN-K360 | | |
| 1107 | anti-hHER2-HC-E388-GDS-ppan-MC-ValCit- | 1.6 ng/mL; 11 pM | >9,000 ng/mL; >60 nM |
| | PABC-MMAF-LSWLLRLLN-N389 | | |

### Example 19

### Labeling of Peptide-Tagged IgGs with a Cytotoxic CoA Analogue in Cell Culture Media

[0876] The bioorthogonality of PPTase-catalyzed 4′-phosphopantetheinylation enables the site-specific labeling of peptide-tagged IgGs in complex mixtures such as conditioned medium. Following the secretion of the peptide-tagged antibody, exogenously added PPTase (such as Sfp) and drug-CoA substrate (such as CoA-MC-MMAF) lead to the formation of homogeneous ADCs, which can be purified in a single step using protein A affinity chromatography.

[0877] For example, HEK293F cells were transfected with plasmid DNA coding for IgG1 heavy chain with S6 tag insertion in the CH3 domain and plasmid DNA coding for unmodified kappa light chain. The 40 mL HEK293F suspension culture was cultured for five days at 37° C. After harvesting by centrifugation at 2000 rpm for 10 minutes, the medium supernatant was supplemented to a final concentration of 40 μM of CoA-MC-MMAF, 10 mM of MgCl₂, and 50 mM of HEPES (pH 7.5). The medium supernatant was then split into two 20 mL aliquots. Recombinantly produced Sfp enzyme (5 μM) was added to one of the aliquots (see Table 20, Experiment #2) and the enzymatic reaction was allowed to proceed for 24 hours at room temperature.

TABLE 20
In-medium labeling scheme.

Experiment #

| | 1 | 2 |
|---|---|---|
| Addition of CoA-MC-MMAF (40 μM) | X | X |
| to medium supernatant | | |
| Addition of Sfp (5 μM) to medium | | X |
| supernatant | | |

[0878] Antibody purification was carried out using Protein A Sepharose Fast Flow columns with 0.25 mL bed volume for each experiment. After equilibration with PBS, the medium supernatants were applied to the columns at a flow rate of about 1 mL/min and the flowthrough was collected. Following washing with 20 column volumes of PBS, bound antibody was eluted using 6 column volumes of 0.1 M sodium acetate (pH 3.0) followed by immediate neutralization with 1 M Tris/HCl (pH 10) to reach a final pH of about 8. The purity of the eluates was assessed by SDS-PAGE analysis and the antibody yield was determined by the Bradford method. Finally, Sfp-dependent in-medium ADC formation was confirmed by ESI-MS and HPLC analysis of the Protein A eluates.

### Example 20

### In Vitro Labeling of Peptide-Tagged IgGs with Acetyl CoA and Subsequent Conjugation with a Cytotoxin

[0879] The principle of the preparation of immune conjugates via acetyl CoA is a three-step chemoenzymatic conjugation protocol in which the acetyl moiety serves as a protecting group for the reactive thiol group of CoA. Furthermore, although PPTases such as Sfp tolerate large CoA analogues (e.g. peptidyl-CoA) for catalysis, the catalytic efficiency (k_{cat}/K_{M}) is significantly reduced compared to CoA itself (see, Sieber et al., J. Am. Chem. Soc. 125: 10862-10866 (2003)). Hence, it is expected that the small acetyl group ensures similar enzyme kinetics as seen for the native CoA substrate.

[0880] For example, covalent conjugation of the acetylated ppan moiety to a peptide-tagged

[0881] IgG antibody is carried out as described in Example 6 using acetyl CoA instead of CoA-MC-MMAF. After confirming quantitative conjugation by ESI-MS, the conjugate is dialyzed into Reaction Buffer (0.1 M sodium phosphate (pH 7.2), 0.15 M NaCl). The dialyzed conjugate is concentrated to about 5 mg/mL and supplemented with 10% (v/v) of Deacetylation Solution containing Reaction Buffer (pH 7.2) with 0.5 M hydroxylamine and 25 mM EDTA. This chemical thioester cleavage reaction is allowed to proceed for 3 hours at room temperature, followed by buffer-exchanging the reaction mixture into Reaction Buffer (pH 7.2) supplemented with 10 mM EDTA. After confirmation of quantitative deacetylation by ESI-MS, the deprotected ppan moiety is then conjugated with 15 equivalents of thiol-reactive maleimide-MC-MMAF (0.5 mM) for 1 hour at room temperature. The reaction is quenched by buffer-exchange into PBS. Finally, quantitative ADC formation is confirmed by ESI-MS and HPLC analysis.

### Example 21

### Labeling of Peptide-Tagged IgGs with Acetyl CoA in Cell Culture Media and Subsequent Conjugation with a Cytotoxin

[0882] The bioorthogonality of PPTase-catalyzed generation of homogeneous ADCs allows the site-specific labeling of IgGs in cell culture media (see Example 19). Instead of directly attaching the cytotoxic drug molecule to the antibody, it is also possible to carry out in-medium labeling with acetyl CoA for ADC generation via a three-step chemoenzymatic conjugation process. The small acetyl CoA analogue allows conjugation reactions with improved catalytic efficiency (k_{cat}/K_{M}) as compared to large cytotoxic CoA analogues, thereby significantly decreasing the amount of enzyme needed for quantitative conjugation. Furthermore, for process development, it would be advantageous to perform labeling reactions in large culture volumes with non-toxic compounds. The peptide-tagged IgG conjugated with the acetyl-ppan moiety can be purified in a single step using protein A affinity chromatography. In order to prepare the immune conjugate starting from the purified acetyl-ppan-conjugated antibody, the two subsequent chemical reactions are carried out as described in Example 20.

### Example 22

### Labeling of Peptide-Tagged IgGs with Acetyl CoA or Bioorthogonal CoA Analogues in Cell Culture Media and Subsequent Conjugation with a Cytotoxin

[0883] The bioorthogonality of PPTase-catalyzed generation of homogeneous ADCs also allows the site-specific labeling of IgGs in cell culture media (see Example 19). Instead of directly attaching the cytotoxic drug molecule to the antibody, it is also possible to carry out in-medium labeling with acetyl CoA for ADC generation via a three-step chemoenzymatic conjugation process. The small acetyl CoA analogue allows conjugation reactions with improved catalytic efficiency (k_{cat}/K_{M}) as compared to large cytotoxic CoA analogues, thereby significantly decreasing the amount of enzyme needed for quantitative conjugation. Furthermore, for process development, it would be advantageous to perform labeling reactions in large culture volumes with non-toxic compounds. The peptide-tagged IgG conjugated with the acetyl-ppan moiety can be purified in a single step using protein A affinity chromatography. In order to prepare the immune conjugate starting from the purified acetyl-ppan-conjugated antibody, the two subsequent chemical reactions are carried out as described in Example 20.

[0884] Alternatively, instead of using acetyl CoA, in-medium labeling can also be performed with CoA analogues covalently linked to bioorthogonal groups, such as azido, alkene, alkyne, ketone, or aldehyde moieties. Following in-medium PPTase catalysis, the peptide-tagged antibody with the ppan-bound bioorthogonal group is purified to homogeneity using protein A affinity chromatography. As the last step of this two-step chemoenzymatic labeling strategy for ADC preparation, the reaction with the complementary bioorthogonal group leads to the site-specific attachment of the drug moiety to the antibody. FIG. 22 exemplifies the two-step method for the site-specific attachment of carbonyl-functionalized CoA analogues to an A1-tagged antibody followed by oxime ligation of the terminal group (TG). After performing the first step in cell-culture medium, the resulting carbonyl-functionalized antibody is purified by protein A affinity purification. The second step then involves reaction of the ppan-linked carbonyl group with an aminooxy-derivatized TG. Following reaction, excess TG is removed by dialysis or buffer exchange. The synthesis of a carbonyl-functionalized CoA analogue (ketone CoA) is described in Example 23.

### Example 23

### Synthesis of Ketone CoA

[0885] 784 μL of a 25 mM aqueous solution of CoA-SH (20 μmol, Sigma-Aldrich) was added to 9.0 mL of 100 mM sodium phosphate buffer (pH 7.1). After diluting methyl vinyl ketone (30 μmol, Sigma-Aldrich) 10-fold in H₂O, 25 μL of the resulting aqueous solution was added to the 2 mM CoA-SH solution. The reaction mixture was shaken at room temperature for 1 hour. The reaction was quenched in liquid nitrogen and stored at −80° C.
The reaction mixture was purified on a SunFire Prep C₁₈ Column (Waters) with 5 μm particle size and 10×100 mm dimensions. After injecting 4-6 mL of reaction mixture, the following gradient between 0.1% (v/v) TFA/water (A) and 0.1% (v/v) TFA/acetonitrile (B) was applied at a flowrate of 5 mL/min.

| Time (min) | % B |
|---|---|
| 0 | 5 |
| 5 | 5 |
| 30 | 100 |

The HPLC-purified ketone CoA was confirmed by LC-MS. ESI-MS calculated for C₂₅H₄₃N₇O₁₇P₃S [MH]⁺: 838.2; observed: 838.1. The desired product was lyophilized and 2.93 mg (3.5 μmol) of ketone CoA was obtained in 18% yield.

### Example 24

### Production and Properties of ADCs with a DAR of 4

[0886] ADCs with a DAR of 4 can be generated by inserting/grafting multiple peptide tags into an antibody, which are substrates of the same enzyme (FIG. 19A). For instance, both the ybbR- and the S6-tags are recognized as substrates by the PPTase Sfp. Conversely, labeling of antibodies with multiple different ligands is achieved by inserting/grafting peptide tags into an antibody, which are substrates of two different PPTases. For example, the A1 tag is exclusively recognized by the AcpS PPTase, while the S6 tag is preferentially modified by the Sfp PPTase. Furthermore, immunoconjugates with higher DARs (e.g., DARs of 6, 8, 10, 12, etc.) may be generated by adding additional tags. Enzymatic conjugation can also be combined with other labeling strategies such as site-specific conjugation through cysteine, pyrrolysine, pyrroline-carboxy-lysine, and unnatural amino acids as well as chemoselective methods such as Lys, Cys or Tyr selective chemistries.

[0887] In order to prepare homogeneous ADCs with a DAR of 4, two peptide tags were incorporated into the heavy chain of Trastuzumab IgG1, namely an S6 tag into the V_{H} domain and a ybbR tag into the CH3 domain (anti-hHER2-HC-V2-GDSLSWLLRLLN-Q3-E388-DSLEFIASKLA-N389 (SEQ ID NO:142)). This dual-tagged antibody was expressed in HEK293F cells on a 50 mL scale. Following transfection, the HEK293F cells were cultured for five days before harvest by centrifugation at 3400 rpm for 15 min. The resulting medium supernatant was filtered through a 0.22-μm-pore-size filter. Purification was accomplished using a Protein A Sepharose Fast Flow column (GE Healthcare) with a bed volume of 0.6 mL, which was equilibrated with 20 column volumes of PBS. The filtered medium supernatant was loaded at a flow rate of about 1 mL/min. After washing the column with 20 column volumes of PBS, the peptide-tagged antibody was eluted with 5 column volumes of 0.1 M sodium acetate (pH 3.0) followed by immediate neutralization with 1 M Tris/HCl (pH 10) to a final pH of about 8. According to the Bradford method, the total yield was 8 mg of purified antibody per liter culture.

[0888] The purity of the antibody construct was assessed by SDS-gel electrophoresis. After concentration with a 30 kDa cut-off Amicon Ultra Centrifugal Filter Unit, 2.5 μM anti-hHER2-HC-V2-GDSLSWLLRLLN-Q3-E388-DSLEFIASKLA-N389 (SEQ ID NO:142) was incubated with 50 μM CoA-MC-MMAF, 1 μM Sfp, 12.5 mM MgCl₂, in 75 mM HEPES buffer, pH 7.5, at 23° C. for 16 hours to enzymatically label the dual-tagged antibody with four drug molecules.

[0889] The deconvoluted mass spectrum of the reduced and deglycosylated antibody construct confirmed the covalent attachment of two ppan-MC-MMAF units to each heavy chain of Trastuzumab (observed mass, 54223.20 Da; expected mass, 54231 Da). Neither uncoupled (expected mass, 51700 Da) nor mono-labeled species (expected mass, 52966 Da) were observed by ESI-MS. Near quantitative conversion to an ADC with a DAR of 4 (95% according to peak area integration) was further confirmed by HPLC analysis (FIG. 19B).

### Example 25

### Generation of a Comprehensive Library of Peptide-Tagged ADCs Using the Protein Expression and Purification Platform (PEPP)

[0890] Based on the examination of the crystal structure of human IgG1 B12 antibody as well as surface accessibility calculations (Example 1), a library of 268 peptide-tagged trastuzumab IgG1 constructs was proposed. Systematic insertion of S6 and ybbR tag sequences into the constant regions was accomplished by standard molecular biology methods using the oligonucleotides listed in Table 8. Sequence confirmed plasmids harboring either the heavy or light chain genes of trastuzumab were used for transient co-transfection of 293 Freestyle™ cells according to the PEI method (Meissner et al., 2001). Culturing of each library member in a volume of 35 mL of Freestyle™ expression media (Invitrogen) for five days at 37° C. under 5% CO₂ was carried out on the PEPP system (Gonzalez R, Jennings L L, Knuth M, Orth A P, Klock H E, Ou W, Feuerhelm J, Hull M V, Koesema E, Wang Y, Zhang J, Wu C, Cho C Y, Su A I, Batalov S, Chen H, Johnson K, Laffitte B, Nguyen D G, Snyder E Y, Schultz P G, Harris J L, Lesley S A. Proc Natl Acad Sci USA. 2010, 107(8):3552-7). Following automated cell harvest, the same system was used to purify the library of peptide-tagged antibodies by Protein A affinity chromatography. Briefly, after 0.22 μm filtration of the medium supernatant, each filtrate was loaded onto a Protein A affinity column containing 0.2 mL of settled resin at an approximate flow rate of 1 mL/min. The column was then washed with 20 column volumes of PBS followed by elution with 5 column volumes of 0.1 M sodium acetate, pH 3.0. The eluate was immediately neutralized with 25% (v/v) of 1 M Tris-HCl (pH 8.0).

[0891] To determine the yield of the Protein A-purified antibodies (Table 21), protein concentrations of the eluates were measured in duplicate on a ND-1000 UV-Vis spectrophotometer (NanoDrop Technologies) at 280 nm using the preset molar extinction coefficient for IgG molecules. After concentrating the peptide-tagged antibodies using 30 kDa cut-off Amicon Ultra-0.5 centrifugal filter devices (EMD Millipore), enzyme-catalyzed conjugation reactions were performed for about 16 hours at 20° C. with 2.5 μM of peptide-tagged antibody, 20 μM of CoA-MC-MMAF substrate, and 1 μM of Sfp enzyme in Tris-HCl buffer (75 mM, pH 8.0) supplemented with 12.5 mM of MgCl₂ and 20 mM of NaCl. The degree of labeling of the peptide-tagged antibodies was quantified by analytical HPLC on a PLRP-S column (4000 Å, 5 IAA, 50×4.6 mm, Agilent Technologies) with a 6-min linear gradient of 25-50% acetonitrile in water containing 0.1% trifluoroacetic acid. The corresponding uncoupled antibodies were used as negative controls (Table 21). After concentrating the antibody conjugates using Amicon Ultra-4 centrifugal filter devices (EMD Millipore), the enzymatic reactions were further analyzed by mass spectrometry on an Agilent 6520 Q-TOF instrument (Agilent Technologies). Deconvoluted ESI-MS spectra of the reduced and deglycosylated antibody conjugates were obtained by using 10 μL of concentrated reaction mixture (Table 21).

[0892] The peptide-tagged ADC constructs were further purified by Ni-NTA (nickel-nitrilotriacetic acid) chromatography to remove Sfp enzyme and excess CoA-MC-MMAF substrate. After equilibration of the Ni-NTA columns (0.2 mL bed volume each) with PBS, the concentrated conjugation samples were loaded onto the columns at an approximate flow rate of 1 mL/min. Next, the columns were washed with 20 column volumes of PBS followed by elution with 5 column volumes of Tris-HCl buffer (50 mM, pH 8.0) supplemented with 250 mM imidazole and 300 mM NaCl. According to Bradford assay, the recovery of the peptide-tagged ADCs averaged 39% of the Protein A-purified starting material. The PEPP system was then used to buffer-exchange each sample into PBS using NAP-10 Columns (GE Healthcare). Following buffer-exchange, the peptide-tagged ADCs were concentrated using Amicon Ultra-4 centrifugal filter devices (EMD Millipore), and the concentrations of the conjugates were adjusted by dilution with PBS. Adjusted to the appropriate concentration, the ADC samples were further characterized by DSF (differential scanning fluorimetry), LC90 (LabChip 90), AnSEC (analytical size-exclusion chromatography), and in vitro potency assays (data not shown).

[0893] Of the originally planned 268 peptide-tagged trastuzumab antibodies, expression was tested for 183 constructs (68%). The expression levels exhibit a great variability ranging from 0 to more than 30 mg of antibody per liter culture (Table 21), with the average being 16 mg (±8 mg standard deviation) of antibody per liter culture. Furthermore, the expression levels correlate with the position of the peptide tag insertion with the 46 light chain constructs (13±8 mg per liter culture) exhibiting lower average expressions levels than the 137 heavy chain constructs (17±8 mg per liter culture). The expression levels also depend on the type of peptide tag: 95 antibody constructs with ybbR tag insertions on average show higher expression levels (19±7 mg per liter culture) than the corresponding 88 constructs with S6 tag insertions (13±8 mg per liter culture). The opposite trend is observed for the conjugation efficiencies based on reverse-phase HPLC analysis: 44 (72%) peptide-tagged constructs with near quantitative ADC formation (drug-to-antibody ratio 1.9) are based on insertion of the S6 peptide sequence, while only 17 (28%) ybbR-tagged antibodies displayed near quantitative conversion to the corresponding ADC.

[0894] On average, heavy chain constructs were conjugated more efficiently than peptide insertions in the light chain: 19% (8 out of 43) of the constructs with peptide tag insertions in the light chain revealed DARs of at least 1.9 while 40% (53 out of 131) of the constructs with peptide tag insertions in the heavy chain could be conjugated with the same efficiency. The best overall conjugation efficiencies are displayed by peptide tag insertions in several loop regions of the CH1 domain. Overall, of the 183 expressed peptide-tagged antibodies, conjugation efficiencies of 174 constructs could be determined with 61 (35%) constructs yielding drug-to-antibody ratios (DARs) of 1.9 or higher.

[0895] Thermostability of the resulting ADCs depends on the site of peptide tag insertion. For instance, most peptide tag insertions in the CH2 domain lead to a significant decrease of the lowest observed thermal transition (Tm1) according to DSF (differential scanning fluorimetry) measurements as will be illustrated in more detail in Example 26. Little aggregation or antibody oligomers were observed for 135 (87%) out of 156 peptide-tagged ADCs that were examined by analytical size-exclusion chromatography 90% monomeric species). The in vitro potency of the peptide-tagged ADCs correlated as expected with their degree of labeling. Although a large number of peptide-tagged ADCs with preferred properties can be generated, the data also illustrate that expression yield, thermal stability, conjugation efficiency and other properties are greatly affected by the choice of tag insertion site.

TABLE 21
ADC preparation and characterization of material prepared on PEPP system.

| | | | Anti- | | | | |
|---|---|---|---|---|---|---|---|
| Anti- | | ADC | body | | Expected | Expected | |
| body | | SEQ ID | yield^{b} | | mass anti- | mass | Observed |
| SEQ ID | ADC name^{a} | NO | (mg/L) | DAR^{c} | body^{d} (Da) | ADC^{e} (Da) | mass^{f} (Da) |
| SEQ ID | anti-hHER2-HC-A118- | SEQ ID | 10 | 2.0 | 50525.0 | 51790.5 | 51792.7 |
| NO: 150 | GDS-ppan-MC-MMAF- | NO: 1136 | | | | | 51814.6 |
| | LSWLLRLLN-S119 | | | | | | |
| SEQ ID | anti-hHER2-HC-S119- | SEQ ID | 12 | 2.0 | 50525.0 | 51790.5 | 51792.4 |
| NO: 151 | GDS-ppan-MC-MMAF- | NO: 1137 | | | | | |
| | LSWLLRLLN-T120 | | | | | | |
| SEQ ID | anti-hHER2-HC-T120- | SEQ ID | 11 | 2.0 | 50525.0 | 51790.5 | 51797.2 |
| NO: 152 | GDS-ppan-MC-MMAF- | NO: 1138 | | | | | |
| | LSWLLRLLN-K121 | | | | | | |
| SEQ ID | anti-hHER2-HC-T135- | SEQ ID | 24 | 2.0 | 50525.0 | 51790.5 | 51792.8 |
| NO: 157 | GDS-ppan-MC-MMAF- | NO: 1139 | | | | | |
| | LSWLLRLLN-S136 | | | | | | |
| SEQ ID | anti-hHER2-HC-S136- | SEQ ID | 20 | 2.0 | 50525.0 | 51790.5 | 51792.0 |
| NO: 158 | GDS-ppan-MC-MMAF- | NO: 1140 | | | | | |
| | LSWLLRLLN-G137 | | | | | | |
| SEQ ID | anti-hHER2-HC-G138- | SEQ ID | 14 | 2.0 | 50525.0 | 51790.5 | 51792.3 |
| NO: 160 | GDS-ppan-MC-MMAF- | NO: 1141 | | | | | 51814.6 |
| | LSWLLRLLN-T139 | | | | | | |
| SEQ ID | anti-hHER2-HC-E152- | SEQ ID | 3 | 0.2 | 50525.0 | 51790.5 | 50528.4 |
| NO: 161 | GDS-ppan-MC-MMAF- | NO: 1142 | | | | | 51794.8 |
| | LSWLLRLLN-P153 | | | | | | |
| SEQ ID | anti-hHER2-HC-P153- | SEQ ID | 0 | N/A | 50525.0 | 51790.5 | N/A |
| NO: 162 | GDS-ppan-MC-MMAF- | NO: 1143 | | | | | |
| | LSWLLRLLN-V154 | | | | | | |
| SEQ ID | anti-hHER2-HC-N159- | SEQ ID | 0 | N/A | 50525.0 | 51790.5 | N/A |
| NO: 163 | GDS-ppan-MC-MMAF- | NO: 1144 | | | | | |
| | LSWLLRLLN-S160 | | | | | | |
| SEQ ID | anti-hHER2-HC-S160- | SEQ ID | 10 | 1.4 | 50525.0 | 51790.5 | 51792.0 |
| NO: 164 | GDS-ppan-MC-MMAF- | NO: 1145 | | | | | |
| | LSWLLRLLN-G161 | | | | | | |
| SEQ ID | anti-hHER2-HC-G161- | SEQ ID | 9 | 1.3 | 50525.0 | 51790.5 | 51798.0 |
| NO: 165 | GDS-ppan-MC-MMAF- | NO: 1146 | | | | | 50529.2 |
| | LSWLLRLLN-A162 | | | | | | |
| SEQ ID | anti-hHER2-HC-A162- | SEQ ID | 15 | 2.0 | 50525.0 | 51790.5 | 51798.4 |
| NO: 166 | GDS-ppan-MC-MMAF- | NO: 1147 | | | | | |
| | LSWLLRLLN-L163 | | | | | | |
| SEQ ID | anti-hHER2-HC-T164- | SEQ ID | 22 | 2.0 | 50525.0 | 51790.5 | 51796.8 |
| NO: 168 | GDS-ppan-MC-MMAF- | NO: 1148 | | | | | |
| | LSWLLRLLN-S165 | | | | | | |
| SEQ ID | anti-hHER2-HC-S165- | SEQ ID | 15 | 2.0 | 50525.0 | 51790.5 | 51794.4 |
| NO: 169 | GDS-ppan-MC-MMAF- | NO: 1149 | | | | | |
| | LSWLLRLLN-G166 | | | | | | |
| SEQ ID | anti-hHER2-HC-P171- | SEQ ID | 3 | N/A | 50525.0 | 51790.5 | N/A |
| NO: 170 | GDS-ppan-MC-MMAF- | NO: 1150 | | | | | |
| | LSWLLRLLN-A172 | | | | | | |
| SEQ ID | anti-hHER2-HC-S176- | SEQ ID | 8 | 1.9 | 50525.0 | 51790.5 | 51791.7 |
| NO: 171 | GDS-ppan-MC-MMAF- | NO: 1151 | | | | | 51812.9 |
| | LSWLLRLLN-S177 | | | | | | |
| SEQ ID | anti-hHER2-HC-P189- | SEQ ID | 24 | 1.5 | 50525.0 | 51790.5 | 51792.4 |
| NO: 173 | GDS-ppan-MC-MMAF- | NO: 1152 | | | | | |
| | LSWLLRLLN-S190 | | | | | | |
| SEQ ID | anti-hHER2-HC-S191- | SEQ ID | 21 | 2.0 | 50525.0 | 51790.5 | 51792.0 |
| NO: 175 | GDS-ppan-MC-MMAF- | NO: 1153 | | | | | 51814.0 |
| | LSWLLRLLN-S192 | | | | | | |
| SEQ ID | anti-hHER2-HC-S192- | SEQ ID | 32 | 2.0 | 50525.0 | 51790.5 | 51792.0 |
| NO: 176 | GDS-ppan-MC-MMAF- | NO: 1154 | | | | | 51813.7 |
| | LSWLLRLLN-L193 | | | | | | |
| SEQ ID | anti-hHER2-HC-L193- | SEQ ID | 18 | 2.0 | 50525.0 | 51790.5 | 51791.0 |
| NO: 177 | GDS-ppan-MC-MMAF- | NO: 1155 | | | | | |
| | LSWLLRLLN-G194 | | | | | | |
| SEQ ID | anti-hHER2-HC-G194- | SEQ ID | 19 | 2.0 | 50525.0 | 51790.5 | 51796.8 |
| NO: 178 | GDS-ppan-MC-MMAF- | NO: 1156 | | | | | |
| | LSWLLRLLN-T195 | | | | | | |
| SEQ ID | anti-hHER2-HC-T195- | SEQ ID | 17 | 2.0 | 50525.0 | 51790.5 | 51800.0 |
| NO: 179 | GDS-ppan-MC-MMAF- | NO: 1157 | | | | | 53918.8 |
| | LSWLLRLLN-Q196 | | | | | | |
| SEQ ID | anti-hHER2-HC-Q196- | SEQ ID | 23 | 1.9 | 50525.0 | 51790.5 | 51791.9 |
| NO: 180 | GDS-ppan-MC-MMAF- | NO: 1158 | | | | | 51813.5 |
| | LSWLLRLLN-T197 | | | | | | |
| SEQ ID | anti-hHER2-HC-K205- | SEQ ID | 22 | 0.2 | 50525.0 | 51790.5 | 50526.7 |
| NO: 181 | GDS-ppan-MC-MMAF- | NO: 1159 | | | | | 51792.6 |
| | LSWLLRLLN-P206 | | | | | | 50548.6 |
| SEQ ID | anti-hHER2-HC-P206- | SEQ ID | 25 | 1.9 | 50525.0 | 51790.5 | 51792.1 |
| NO: 182 | GDS-ppan-MC-MMAF- | NO: 1160 | | | | | 51813.9 |
| | LSWLLRLLN-S207 | | | | | | |
| SEQ ID | anti-hHER2-HC-A231- | SEQ ID | 35 | 2.0 | 50525.0 | 51790.5 | 51789.5 |
| NO: 185 | GDS-ppan-MC-MMAF- | NO: 1161 | | | | | 51810.4 |
| | LSWLLRLLN-P232 | | | | | | |
| SEQ ID | anti-hHER2-HC-E233- | SEQ ID | 13 | 1.9 | 50525.0 | 51790.5 | 51789.5 |
| NO: 187 | GDS-ppan-MC-MMAF- | NO: 1162 | | | | | 51770.4 |
| | LSWLLRLLN-L234 | | | | | | 51809.6 |
| SEQ ID | anti-hHER2-HC-L235- | SEQ ID | 16 | 1.9 | 50525.0 | 51790.5 | 51790.1 |
| NO: 189 | GDS-ppan-MC-MMAF- | NO: 1163 | | | | | 51811.8 |
| | LSWLLRLLN-G236 | | | | | | |
| SEQ ID | anti-hHER2-HC-P244- | SEQ ID | 12 | 0.8 | 50525.0 | 51790.5 | 50522.7 |
| NO: 191 | GDS-ppan-MC-MMAF- | NO: 1164 | | | | | 51790.6 |
| | LSWLLRLLN-P245 | | | | | | 50545.4 |
| SEQ ID | anti-hHER2-HC-I253- | SEQ ID | 23 | 1.9 | 50525.0 | 51790.5 | 51789.0 |
| NO: 193 | GDS-ppan-MC-MMAF- | NO: 1165 | | | | | 51809.6 |
| | LSWLLRLLN-S254 | | | | | | |
| SEQ ID | anti-hHER2-HC-S254- | SEQ ID | 20 | 2.0 | 50525.0 | 51790.5 | 51789.5 |
| NO: 194 | GDS-ppan-MC-MMAF- | NO: 1166 | | | | | 51810.5 |
| | LSWLLRLLN-R255 | | | | | | |
| SEQ ID | anti-hHER2-HC-R255- | SEQ ID | 25 | 2.0 | 50525.0 | 51790.5 | 51792.2 |
| NO: 195 | GDS-ppan-MC-MMAF- | NO: 1167 | | | | | 51814.5 |
| | LSWLLRLLN-T256 | | | | | | |
| SEQ ID | anti-hHER2-HC-S267- | SEQ ID | 20 | 2.0 | 50525.0 | 51790.5 | 51789.2 |
| NO: 198 | GDS-ppan-MC-MMAF- | NO: 1168 | | | | | 51810.1 |
| | LSWLLRLLN-H268 | | | | | | |
| SEQ ID | anti-hHER2-HC-H268- | SEQ ID | 10 | 2.0 | 50525.0 | 51790.5 | 51789.6 |
| NO: 199 | GDS-ppan-MC-MMAF- | NO: 1169 | | | | | 51810.0 |
| | LSWLLRLLN-E269 | | | | | | |
| SEQ ID | anti-hHER2-HC-E269- | SEQ ID | 0 | N/A | 50525.0 | 51790.5 | N/A |
| NO: 200 | GDS-ppan-MC-MMAF- | NO: 1170 | | | | | |
| | LSWLLRLLN-D270 | | | | | | |
| SEQ ID | anti-hHER2-HC-D270- | SEQ ID | 18 | 2.0 | 50525.0 | 51790.5 | 51789.8 |
| NO: 201 | GDS-ppan-MC-MMAF- | NO: 1171 | | | | | 51771.0 |
| | LSWLLRLLN-P271 | | | | | | 51811.2 |
| SEQ ID | anti-hHER2-HC-P271- | SEQ ID | 8 | 2.0 | 50525.0 | 51790.5 | 51796.4 |
| NO: 202 | GDS-ppan-MC-MMAF- | NO: 1172 | | | | | |
| | LSWLLRLLN-E272 | | | | | | |
| SEQ ID | anti-hHER2-HC-P291- | SEQ ID | 23 | 1.8 | 50525.0 | 51790.5 | 51789.8 |
| NO: 206 | GDS-ppan-MC-MMAF- | NO: 1173 | | | | | 51811.3 |
| | LSWLLRLLN-R292 | | | | | | |
| SEQ ID | anti-hHER2-HC-T307- | SEQ ID | 4 | n.d. | 50525.0 | 51790.5 | 51793.6 |
| NO: 207 | GDS-ppan-MC-MMAF- | NO: 1174 | | | | | 50526.4 |
| | LSWLLRLLN-V308 | | | | | | |
| SEQ ID | anti-hHER2-HC-L309- | SEQ ID | 10 | n.d. | 50525.0 | 51790.5 | 51795.6 |
| NO: 209 | GDS-ppan-MC-MMAF- | NO: 1175 | | | | | 50530.8 |
| | LSWLLRLLN-H310 | | | | | | |
| SEQ ID | anti-hHER2-HC-N315- | SEQ ID | 13 | 0.9 | 50525.0 | 51790.5 | 51788.9 |
| NO: 211 | GDS-ppan-MC-MMAF- | NO: 1176 | | | | | 50523.3 |
| | LSWLLRLLN-G316 | | | | | | 51810.4 |
| SEQ ID | anti-hHER2-HC-G316- | SEQ ID | 7 | 0.8 | 50525.0 | 51790.5 | 50524.1 |
| NO: 212 | GDS-ppan-MC-MMAF- | NO: 1177 | | | | | 51789.7 |
| | LSWLLRLLN-K317 | | | | | | 50545.9 |
| SEQ ID | anti-hHER2-HC-A327- | SEQ ID | 14 | 0.5 | 50525.0 | 51790.5 | 51789.9 |
| NO: 215 | GDS-ppan-MC-MMAF- | NO: 1178 | | | | | 50522.7 |
| | LSWLLRLLN-L328 | | | | | | |
| SEQ ID | anti-hHER2-HC-L328- | SEQ ID | 16 | 1.0 | 50525.0 | 51790.5 | 51789.8 |
| NO: 216 | GDS-ppan-MC-MMAF- | NO: 1179 | | | | | 50523.2 |
| | LSWLLRLLN-P329 | | | | | | 51810.9 |
| SEQ ID | anti-hHER2-HC-P329- | SEQ ID | 18 | 1.5 | 50525.0 | 51790.5 | 51790.1 |
| NO: 217 | GDS-ppan-MC-MMAF- | NO: 1180 | | | | | 51811.9 |
| | LSWLLRLLN-A330 | | | | | | |
| SEQ ID | anti-hHER2-HC-A330- | SEQ ID | 9 | 1.7 | 50525.0 | 51790.5 | 51792.4 |
| NO: 218 | GDS-ppan-MC-MMAF- | NO: 1181 | | | | | 50527.6 |
| | LSWLLRLLN-P331 | | | | | | |
| SEQ ID | anti-hHER2-HC-K340- | SEQ ID | 6 | 1.8 | 50525.0 | 51790.5 | 51792.4 |
| NO: 220 | GDS-ppan-MC-MMAF- | NO: 1182 | | | | | 51604.8 |
| | LSWLLRLLN-G341 | | | | | | |
| SEQ ID | anti-hHER2-HC-G341- | SEQ ID | 26 | 1.9 | 50525.0 | 51790.5 | 51790.0 |
| NO: 221 | GDS-ppan-MC-MMAF- | NO: 1183 | | | | | |
| | LSWLLRLLN-Q342 | | | | | | |
| SEQ ID | anti-hHER2-HC-Q342- | SEQ ID | 0 | N/A | 50525.0 | 51790.5 | N/A |
| NO: 222 | GDS-ppan-MC-MMAF- | NO: 1184 | | | | | |
| | LSWLLRLLN-P343 | | | | | | |
| SEQ ID | anti-hHER2-HC-P343- | SEQ ID | 14 | 2.0 | 50525.0 | 51790.5 | 51792.2 |
| NO: 223 | GDS-ppan-MC-MMAF- | NO: 1185 | | | | | 51809.3 |
| | LSWLLRLLN-R344 | | | | | | |
| SEQ ID | anti-hHER2-HC-R344- | SEQ ID | 16 | 2.0 | 50525.0 | 51790.5 | 51794.4 |
| NO: 224 | GDS-ppan-MC-MMAF- | NO: 1186 | | | | | |
| | LSWLLRLLN-E345 | | | | | | |
| SEQ ID | anti-hHER2-HC-K360- | SEQ ID | 26 | 2.0 | 50525.0 | 51790.5 | 51796.8 |
| NO: 229 | GDS-ppan-MC-MMAF- | NO: 1187 | | | | | |
| | LSWLLRLLN-N361 | | | | | | |
| SEQ ID | anti-hHER2-HC-N384- | SEQ ID | 2 | 2.0 | 50525.0 | 51790.5 | 51792.8 |
| NO: 230 | GDS-ppan-MC-MMAF- | NO: 1188 | | | | | |
| | LSWLLRLLN-G385 | | | | | | |
| SEQ ID | anti-hHER2-HC-E388- | SEQ ID | 23 | 2.0 | 50525.0 | 51790.5 | 51794.4 |
| NO: 127 | GDS-ppan-MC-MMAF- | NO: 1118 | | | | | |
| | LSWLLRLLN-N389 | | | | | | |
| SEQ ID | anti-hHER2-HC-T394- | SEQ ID | 3 | 0.7 | 50525.0 | 51790.5 | 51793.2 |
| NO: 232 | GDS-ppan-MC-MMAF- | NO: 1189 | | | | | 50525.2 |
| | LSWLLRLLN-P395 | | | | | | |
| SEQ ID | anti-hHER2-HC-P395- | SEQ ID | 4 | n.d. | 50525.0 | 51790.5 | 51794.6 |
| NO: 233 | GDS-ppan-MC-MMAF- | NO: 1190 | | | | | 51773.9 |
| | LSWLLRLLN-P396 | | | | | | 51820.4 |
| SEQ ID | anti-hHER2-HC-D401- | SEQ ID | 10 | 0.2 | 50525.0 | 51790.5 | 51793.7 |
| NO: 235 | GDS-ppan-MC-MMAF- | NO: 1191 | | | | | 51818.2 |
| | LSWLLRLLN-G402 | | | | | | |
| SEQ ID | anti-hHER2-HC-S415- | SEQ ID | 5 | 1.1 | 50525.0 | 51790.5 | 51792.8 |
| NO: 236 | GDS-ppan-MC-MMAF- | NO: 1192 | | | | | 50526.8 |
| | LSWLLRLLN-R416 | | | | | | |
| SEQ ID | anti-hHER2-HC-R416- | SEQ ID | 5 | 1.7 | 50525.0 | 51790.5 | 51794.1 |
| NO: 237 | GDS-ppan-MC-MMAF- | NO: 1193 | | | | | |
| | LSWLLRLLN-W417 | | | | | | |
| SEQ ID | anti-hHER2-HC-W417- | SEQ ID | 15 | 1.4 | 50525.0 | 51790.5 | 51798.8 |
| NO: 238 | GDS-ppan-MC-MMAF- | NO: 1194 | | | | | 51921.6^{g} |
| | LSWLLRLLN-Q418 | | | | | | |
| SEQ ID | anti-hHER2-HC-Q418- | SEQ ID | 9 | 2.0 | 50525.0 | 51790.5 | 51794.4 |
| NO: 239 | GDS-ppan-MC-MMAF- | NO: 1195 | | | | | |
| | LSWLLRLLN-Q419 | | | | | | |
| SEQ ID | anti-hHER2-HC-H433- | SEQ ID | 5 | 2.0 | 50525.0 | 51790.5 | 51793.6 |
| NO: 243 | GDS-ppan-MC-MMAF- | NO: 1196 | | | | | 51922.4^{g} |
| | LSWLLRLLN-N434 | | | | | | 51735.6 |
| SEQ ID | anti-hHER2-HC-N434- | SEQ ID | 20 | 2.0 | 50525.0 | 51790.5 | 51797.6 |
| NO: 244 | GDS-ppan-MC-MMAF- | NO: 1197 | | | | | 51923.6^{g} |
| | LSWLLRLLN-H435 | | | | | | |
| SEQ ID | anti-hHER2-HC-L443- | SEQ ID | 24 | 0.0 | 50525.0 | 51790.5 | 50527.2 |
| NO: 246 | GDS-ppan-MC-MMAF- | NO: 1198 | | | | | 50547.1 |
| | LSWLLRLLN-S444 | | | | | | |
| SEQ ID | anti-hHER2-HC-P445- | SEQ ID | 10 | 2.0 | 50525.0 | 51790.5 | 51786.8 |
| NO: 248 | GDS-ppan-MC-MMAF- | NO: 1199 | | | | | 51915.6^{g} |
| | LSWLLRLLN-G446 | | | | | | 51729.6 |
| SEQ ID | anti-hHER2-HC-A118- | SEQ ID | 18 | 1.5 | 50331.8 | 51597.3 | 51598.4 |
| NO: 249 | DS-ppan-MC-MMAF- | NO: 1200 | | | | | 51618.3 |
| | LEFIASKLA-S119 | | | | | | |
| SEQ ID | anti-hHER2-HC-S119- | SEQ ID | 15 | 1.6 | 50331.8 | 51597.3 | 51602.4 |
| NO: 250 | DS-ppan-MC-MMAF- | NO: 1201 | | | | | |
| | LEFIASKLA-T120 | | | | | | |
| SEQ ID | anti-hHER2-HC-T120- | SEQ ID | 27 | 2.0 | 50331.8 | 51597.3 | 51600.8 |
| NO: 251 | DS-ppan-MC-MMAF- | NO: 1202 | | | | | |
| | LEFIASKLA-K121 | | | | | | |
| SEQ ID | anti-hHER2-HC-S136- | SEQ ID | 19 | 2.0 | 50331.8 | 51597.3 | 51603.2 |
| NO: 257 | DS-ppan-MC-MMAF- | NO: 1203 | | | | | |
| | LEFIASKLA-137 | | | | | | |
| SEQ ID | anti-hHER2-HC-G138- | SEQ ID | 21 | 2.0 | 50331.8 | 51597.3 | 51601.6 |
| NO: 259 | DS-ppan-MC-MMAF- | NO: 1204 | | | | | |
| | LEFIASKLA-T139 | | | | | | |
| SEQ ID | anti-hHER2-HC-P153- | SEQ ID | 15 | 0.1 | 50331.8 | 51597.3 | 50339.6 |
| NO: 261 | DS-ppan-MC-MMAF- | NO: 1205 | | | | | |
| | LEFIASKLA-V154 | | | | | | |
| SEQ ID | anti-hHER2-HC-N159- | SEQ ID | 13 | n.d. | 50331.8 | 51597.3 | 50334.4 |
| NO: 262 | DS-ppan-MC-MMAF- | NO: 1206 | | | | | 51600.4 |
| | LEFIASKLA-S160 | | | | | | |
| SEQ ID | anti-hHER2-HC-A162- | SEQ ID | 16 | 1.7 | 50331.8 | 51597.3 | 51598.3 |
| NO: 265 | DS-ppan-MC-MMAF- | NO: 1207 | | | | | 51618.5 |
| | LEFIASKLA-L163 | | | | | | |
| SEQ ID | anti-hHER2-HC-T164- | SEQ ID | 18 | 1.2 | 50331.8 | 51597.3 | 51597.7 |
| NO: 267 | DS-ppan-MC-MMAF- | NO: 1208 | | | | | 51616.8 |
| | LEFIASKLA-S165 | | | | | | |
| SEQ ID | anti-hHER2-HC-S165- | SEQ ID | 23 | 1.9 | 50331.8 | 51597.3 | 51595.2 |
| NO: 268 | DS-ppan-MC-MMAF- | NO: 1209 | | | | | |
| | LEFIASKLA-G166 | | | | | | |
| SEQ ID | anti-hHER2-HC-P171- | SEQ ID | 15 | 1.0 | 50331.8 | 51597.3 | 50332.9 |
| NO: 269 | DS-ppan-MC-MMAF- | NO: 1210 | | | | | 50353.8 |
| | LEFIASKLA-A172 | | | | | | |
| SEQ ID | anti-hHER2-HC-S176- | SEQ ID | 13 | 0.1 | 50331.8 | 51597.3 | 50333.0 |
| NO: 270 | DS-ppan-MC-MMAF- | NO: 1211 | | | | | 50354.0 |
| | LEFIASKLA-S177 | | | | | | |
| SEQ ID | anti-hHER2-HC-S190- | SEQ ID | 23 | 0.2 | 50331.8 | 51597.3 | 50333.6 |
| NO: 273 | DS-ppan-MC-MMAF- | NO: 1212 | | | | | 51600.8 |
| | LEFIASKLA-S191 | | | | | | |
| SEQ ID | anti-hHER2-HC-S191- | SEQ ID | 24 | 1.6 | 50331.8 | 51597.3 | 51598.9 |
| NO: 274 | DS-ppan-MC-MMAF- | NO: 1213 | | | | | 51620.3 |
| | LEFIASKLA-S192 | | | | | | |
| SEQ ID | anti-hHER2-HC-S192- | SEQ ID | 21 | 2.0 | 50331.8 | 51597.3 | 51598.4 |
| NO: 275 | DS-ppan-MC-MMAF- | NO: 1214 | | | | | 51618.8 |
| | LEFIASKLA-L193 | | | | | | |
| SEQ ID | anti-hHER2-HC-G194- | SEQ ID | 14 | 1.6 | 50331.8 | 51597.3 | 51599.2 |
| NO: 277 | DS-ppan-MC-MMAF- | NO: 1215 | | | | | |
| | LEFIASKLA-T195 | | | | | | |
| SEQ ID | anti-hHER2-HC-T195- | SEQ ID | 14 | 1.9 | 50331.8 | 51597.3 | 51599.0 |
| NO: 278 | DS-ppan-MC-MMAF- | NO: 1216 | | | | | 51617.2 |
| | LEFIASKLA-Q196 | | | | | | |
| SEQ ID | anti-hHER2-HC-Q196- | SEQ ID | 21 | 2.0 | 50331.8 | 51597.3 | 51598.1 |
| NO: 279 | DS-ppan-MC-MMAF- | NO: 1217 | | | | | 51618.7 |
| | LEFIASKLA-T197 | | | | | | |
| SEQ ID | anti-hHER2-HC-K205- | SEQ ID | 24 | 0.0 | 50331.8 | 51597.3 | 50327.6 |
| NO: 280 | DS-ppan-MC-MMAF- | NO: 1218 | | | | | |
| | LEFIASKLA-P206 | | | | | | |
| SEQ ID | anti-hHER2-HC-P206- | SEQ ID | 23 | 0.0 | 50331.8 | 51597.3 | 50333.3 |
| NO: 281 | DS-ppan-MC-MMAF- | NO: 1219 | | | | | 50354.7 |
| | LEFIASKLA-S207 | | | | | | |
| SEQ ID | anti-hHER2-HC-E233- | SEQ ID | 28 | 0.6 | 50331.8 | 51597.3 | 50330.8 |
| NO: 286 | DS-ppan-MC-MMAF- | NO: 1220 | | | | | 51596.6 |
| | LEFIASKLA-L234 | | | | | | 51615.6 |
| SEQ ID | anti-hHER2-HC-L235- | SEQ ID | 24 | 2.0 | 50331.8 | 51597.3 | 51596.7 |
| NO: 288 | DS-ppan-MC-MMAF- | NO: 1221 | | | | | 51617.5 |
| | LEFIASKLA-G236 | | | | | | |
| SEQ ID | anti-hHER2-HC-G236- | SEQ ID | 22 | 1.3 | 50331.8 | 51597.3 | 51598.8 |
| NO: 289 | DS-ppan-MC-MMAF- | NO: 1222 | | | | | 51620.7 |
| | LEFIASKLA-G237 | | | | | | |
| SEQ ID | anti-hHER2-HC-P244- | SEQ ID | 8 | 1.4 | 50331.8 | 51597.3 | 51596.8 |
| NO: 290 | DS-ppan-MC-MMAF- | NO: 1223 | | | | | 51614.6 |
| | LEFIASKLA-P245 | | | | | | |
| SEQ ID | anti-hHER2-HC-P245- | SEQ ID | 22 | 1.0 | 50331.8 | 51597.3 | 50330.6 |
| NO: 291 | DS-ppan-MC-MMAF- | NO: 1224 | | | | | 51595.9 |
| | LEFIASKLA-K246 | | | | | | 50351.5 |
| SEQ ID | anti-hHER2-HC-I253-DS- | SEQ ID | 0 | N/A | 50331.8 | 51597.3 | N/A |
| NO: 292 | ppan-MC-MMAF- | NO: 1225 | | | | | |
| | LEFIASKLA-S254 | | | | | | |
| SEQ ID | anti-hHER2-HC-S254- | SEQ ID | 24 | 1.9 | 50331.8 | 51597.3 | 51596.6 |
| NO: 293 | DS-ppan-MC-MMAF- | NO: 1226 | | | | | 51616.8 |
| | LEFIASKLA-R255 | | | | | | |
| SEQ ID | anti-hHER2-HC-R255- | SEQ ID | 21 | 2.0 | 50331.8 | 51597.3 | 51596.3 |
| NO: 294 | DS-ppan-MC-MMAF- | NO: 1227 | | | | | 51616.5 |
| | LEFIASKLA-T256 | | | | | | |
| SEQ ID | anti-hHER2-HC-P257- | SEQ ID | 22 | 1.9 | 50331.8 | 51597.3 | 51596.3 |
| NO: 296 | DS-ppan-MC-MMAF- | NO: 1228 | | | | | 51616.1 |
| | LEFIASKLA-E258 | | | | | | |
| SEQ ID | anti-hHER2-HC-S267- | SEQ ID | 23 | 0.2 | 50331.8 | 51597.3 | 51596.0 |
| NO: 297 | DS-ppan-MC-MMAF- | NO: 1229 | | | | | 50330.9 |
| | LEFIASKLA-H268 | | | | | | 51615.6 |
| SEQ ID | anti-hHER2-HC-H268- | SEQ ID | 22 | 0.7 | 50331.8 | 51597.3 | 51596.2 |
| NO: 298 | DS-ppan-MC-MMAF- | NO: 1230 | | | | | 50331.0 |
| | LEFIASKLA-E269 | | | | | | 51616.8 |
| SEQ ID | anti-hHER2-HC-E269- | SEQ ID | 17 | 1.8 | 50331.8 | 51597.3 | 51598.7 |
| NO: 299 | DS-ppan-MC-MMAF- | NO: 1231 | | | | | 51620.0 |
| | LEFIASKLA-D270 | | | | | | |
| SEQ ID | anti-hHER2-HC-D270- | SEQ ID | 26 | 1.3 | 50331.8 | 51597.3 | 51596.4 |
| NO: 300 | DS-ppan-MC-MMAF- | NO: 1232 | | | | | 51616.5 |
| | LEFIASKLA-P271 | | | | | | |
| SEQ ID | anti-hHER2-HC-P271- | SEQ ID | 22 | 1.7 | 50331.8 | 51597.3 | 51595.9 |
| NO: 301 | DS-ppan-MC-MMAF- | NO: 1233 | | | | | 51615.4 |
| | LEFIASKLA-E272 | | | | | | |
| SEQ ID | anti-hHER2-HC-D280- | SEQ ID | 4 | 0.7 | 50331.8 | 51597.3 | 50330.8 |
| NO: 302 | DS-ppan-MC-MMAF- | NO: 1234 | | | | | 51596.3 |
| | LEFIASKLA-G281 | | | | | | 50351.7 |
| SEQ ID | anti-hHER2-HC-H285- | SEQ ID | 25 | 0.0 | 50331.8 | 51597.3 | 50331.0 |
| NO: 303 | DS-ppan-MC-MMAF- | NO: 1235 | | | | | 50352.7 |
| | LEFIASKLA-N286 | | | | | | |
| SEQ ID | anti-hHER2-HC-N286- | SEQ ID | 20 | 0.0 | 50331.8 | 51597.3 | 50332.0 |
| NO: 304 | DS-ppan-MC-MMAF- | NO: 1236 | | | | | 50354.1 |
| | LEFIASKLA-A287 | | | | | | |
| SEQ ID | anti-hHER2-HC-P291- | SEQ ID | 21 | 0.5 | 50331.8 | 51597.3 | 50333.5 |
| NO: 305 | DS-ppan-MC-MMAF- | NO: 1237 | | | | | 51598.8 |
| | LEFIASKLA-R292 | | | | | | 51620.0 |
| SEQ ID | anti-hHER2-HC-N315- | SEQ ID | 15 | n.d. | 50331.8 | 51597.3 | 50331.5 |
| NO: 310 | DS-ppan-MC-MMAF- | NO: 1238 | | | | | 51596.8 |
| | LEFIASKLA-G316 | | | | | | 50353.1 |
| SEQ ID | anti-hHER2-HC-G316- | SEQ ID | 9 | 1.1 | 50331.8 | 51597.3 | 51596.6 |
| NO: 311 | DS-ppan-MC-MMAF- | NO: 1239 | | | | | 50331.0 |
| | LEFIASKLA-K317 | | | | | | 51614.0 |
| SEQ ID | anti-hHER2-HC-K317- | SEQ ID | 10 | 0.8 | 50331.8 | 51597.3 | 50330.9 |
| NO: 312 | DS-ppan-MC-MMAF- | NO: 1240 | | | | | 51596.3 |
| | LEFIASKLA-E318 | | | | | | 50352.1 |
| SEQ ID | anti-hHER2-HC-K326- | SEQ ID | 15 | 0.0 | 50331.8 | 51597.3 | 50330.8 |
| NO: 313 | DS-ppan-MC-MMAF- | NO: 1241 | | | | | 51597.2 |
| | LEFIASKLA-A327 | | | | | | |
| SEQ ID | anti-hHER2-HC-A327- | SEQ ID | 25 | 0.1 | 50331.8 | 51597.3 | 50333.6 |
| NO: 314 | DS-ppan-MC-MMAF- | NO: 1242 | | | | | 50355.1 |
| | LEFIASKLA-L328 | | | | | | |
| SEQ ID | anti-hHER2-HC-L328- | SEQ ID | 13 | 1.9 | 50331.8 | 51597.3 | 51598.8 |
| NO: 315 | DS-ppan-MC-MMAF- | NO: 1243 | | | | | |
| | LEFIASKLA-P329 | | | | | | |
| SEQ ID | anti-hHER2-HC-P329- | SEQ ID | 7 | 0.9 | 50331.8 | 51597.3 | 51601.6 |
| NO: 316 | DS-ppan-MC-MMAF- | NO: 1244 | | | | | 50334.8 |
| | LEFIASKLA-A330 | | | | | | |
| SEQ ID | anti-hHER2-HC-A330- | SEQ ID | 25 | 1.8 | 50331.8 | 51597.3 | 51602.4 |
| NO: 317 | DS-ppan-MC-MMAF- | NO: 1245 | | | | | |
| | LEFIASKLA-P331 | | | | | | |
| SEQ ID | anti-hHER2-HC-A339- | SEQ ID | 25 | 0.0 | 50331.8 | 51597.3 | 50333.6 |
| NO: 318 | DS-ppan-MC-MMAF- | NO: 1246 | | | | | |
| | LEFIASKLA-K340 | | | | | | |
| SEQ ID | anti-hHER2-HC-K340- | SEQ ID | 27 | 0.4 | 50331.8 | 51597.3 | 51600.4 |
| NO: 319 | DS-ppan-MC-MMAF- | NO: 1247 | | | | | 50333.2 |
| | LEFIASKLA-G341 | | | | | | |
| SEQ ID | anti-hHER2-HC-G341- | SEQ ID | 25 | 0.2 | 50331.8 | 51597.3 | 51599.9 |
| NO: 320 | DS-ppan-MC-MMAF- | NO: 1248 | | | | | 50334.7 |
| | LEFIASKLA-Q342 | | | | | | |
| SEQ ID | anti-hHER2-HC-Q342- | SEQ ID | 28 | 0.8 | 50331.8 | 51597.3 | 51599.8 |
| NO: 321 | DS-ppan-MC-MMAF- | NO: 1249 | | | | | 50334.5 |
| | LEFIASKLA-P343 | | | | | | |
| SEQ ID | anti-hHER2-HC-P343- | SEQ ID | 24 | 1.9 | 50331.8 | 51597.3 | 51599.1 |
| NO: 322 | DS-ppan-MC-MMAF- | NO: 1250 | | | | | 51615.8 |
| | LEFIASKLA-R344 | | | | | | |
| SEQ ID | anti-hHER2-HC-R344- | SEQ ID | 29 | 1.9 | 50331.8 | 51597.3 | 51600.1 |
| NO: 323 | DS-ppan-MC-MMAF- | NO: 1251 | | | | | 51616.6 |
| | LEFIASKLA-E345 | | | | | | |
| SEQ ID | anti-hHER2-HC-E356- | SEQ ID | 20 | 0.8 | 50331.8 | 51597.3 | 51600.8 |
| NO: 325 | DS-ppan-MC-MMAF- | NO: 1252 | | | | | 50335.1 |
| | LEFIASKLA-E357 | | | | | | 51616.8 |
| SEQ ID | anti-hHER2-HC-M358- | SEQ ID | 26 | 0.2 | 50331.8 | 51597.3 | 50333.9 |
| NO: 327 | DS-ppan-MC-MMAF- | NO: 1253 | | | | | 51599.4 |
| | LEFIASKLA-T359 | | | | | | |
| SEQ ID | anti-hHER2-HC-K360- | SEQ ID | 24 | 0.6 | 50331.8 | 51597.3 | 51599.9 |
| NO: 328 | DS-ppan-MC-MMAF- | NO: 1254 | | | | | 51615.1 |
| | LEFIASKLA-N361 | | | | | | |
| SEQ ID | anti-hHER2-HC-N384- | SEQ ID | 24 | 0.0 | 50331.8 | 51597.3 | 50334.3 |
| NO: 329 | DS-ppan-MC-MMAF- | NO: 1255 | | | | | 50354.2 |
| | LEFIASKLA-G385 | | | | | | |
| SEQ ID | anti-hHER2-HC-E388- | SEQ ID | 21 | 1.9 | 50331.8 | 51597.3 | 51601.2 |
| NO: 129 | DS-ppan-MC-MMAF- | NO: 1122 | | | | | |
| | LEFIASKLA-N389 | | | | | | |
| SEQ ID | anti-hHER2-HC-N389- | SEQ ID | 25 | 1.6 | 50331.8 | 51597.3 | 51600.1 |
| NO: 330 | DS-ppan-MC-MMAF- | NO: 1256 | | | | | 51620.9 |
| | LEFIASKLA-N390 | | | | | | |
| SEQ ID | anti-hHER2-HC-P395- | SEQ ID | 25 | 0.0 | 50331.8 | 51597.3 | 50334.4 |
| NO: 332 | DS-ppan-MC-MMAF- | NO: 1257 | | | | | 50352.8 |
| | LEFIASKLA-P396 | | | | | | |
| SEQ ID | anti-hHER2-HC-D399- | SEQ ID | 11 | 0.0 | 50331.8 | 51597.3 | 50335.1 |
| NO: 333 | DS-ppan-MC-MMAF- | NO: 1258 | | | | | 50353.6 |
| | LEFIASKLA-S400 | | | | | | |
| SEQ ID | anti-hHER2-HC-D401- | SEQ ID | 23 | 0.0 | 50331.8 | 51597.3 | 50334.9 |
| NO: 335 | DS-ppan-MC-MMAF- | NO: 1259 | | | | | 50353.0 |
| | LEFIASKLA-G402 | | | | | | |
| SEQ ID | anti-hHER2-HC-S415- | SEQ ID | 21 | 0.2 | 50331.8 | 51597.3 | 50335.0 |
| NO: 336 | DS-ppan-MC-MMAF- | NO: 1260 | | | | | 51600.5 |
| | LEFIASKLA-R416 | | | | | | |
| SEQ ID | anti-hHER2-HC-R416- | SEQ ID | 15 | 1.9 | 50331.8 | 51597.3 | 51599.9 |
| NO: 337 | DS-ppan-MC-MMAF- | NO: 1261 | | | | | 51615.8 |
| | LEFIASKLA-W417 | | | | | | |
| SEQ ID | anti-hHER2-HC-W417- | SEQ ID | 9 | 0.2 | 50331.8 | 51597.3 | 50334.8 |
| NO: 338 | DS-ppan-MC-MMAF- | NO: 1262 | | | | | 51599.9 |
| | LEFIASKLA-Q418 | | | | | | 50353.4 |
| SEQ ID | anti-hHER2-HC-Q418- | SEQ ID | 22 | 0.5 | 50331.8 | 51597.3 | 51600.5 |
| NO: 339 | DS-ppan-MC-MMAF- | NO: 1263 | | | | | 50335.2 |
| | LEFIASKLA-Q419 | | | | | | 51616.7 |
| SEQ ID | anti-hHER2-HC-Q419- | SEQ ID | 21 | 0.8 | 50331.8 | 51597.3 | 51600.0 |
| NO: 340 | DS-ppan-MC-MMAF- | NO: 1264 | | | | | 51616.5 |
| | LEFIASKLA-G420 | | | | | | |
| SEQ ID | anti-hHER2-HC-G420- | SEQ ID | 22 | 1.1 | 50331.8 | 51597.3 | 51599.5 |
| NO: 341 | DS-ppan-MC-MMAF- | NO: 1265 | | | | | 51616.0 |
| | LEFIASKLA-N421 | | | | | | |
| SEQ ID | anti-hHER2-HC-N421- | SEQ ID | 24 | 1.4 | 50331.8 | 51597.3 | 51600.6 |
| NO: 342 | DS-ppan-MC-MMAF- | NO: 1266 | | | | | 51614.9 |
| | LEFIASKLA-V422 | | | | | | |
| SEQ ID | anti-hHER2-HC-H433- | SEQ ID | 26 | 0.0 | 50331.8 | 51597.3 | 50334.7 |
| NO: 343 | DS-ppan-MC-MMAF- | NO: 1267 | | | | | 50276.2 |
| | LEFIASKLA-N434 | | | | | | |
| SEQ ID | anti-hHER2-HC-N434- | SEQ ID | 25 | 0.6 | 50331.8 | 51597.3 | 51592.4 |
| NO: 344 | DS-ppan-MC-MMAF- | NO: 1268 | | | | | 50326.8 |
| | LEFIASKLA-H435 | | | | | | 50268.8 |
| SEQ ID | anti-hHER2-HC-L443- | SEQ ID | 26 | 0.0 | 50331.8 | 51597.3 | 50334.5 |
| NO: 346 | DS-ppan-MC-MMAF- | NO: 1269 | | | | | 50275.8 |
| | LEFIASKLA-S444 | | | | | | 50353.4 |
| SEQ ID | anti-hHER2-HC-G446- | SEQ ID | 29 | 1.8 | 50331.8 | 51597.3 | 51595.2 |
| NO: 349 | DS-ppan-MC-MMAF- | NO: 1270 | | | | | |
| | LEFIASKLA-K447 | | | | | | |
| SEQ ID | anti-hHER2-LC-T109- | SEQ ID | 34 | 1.4 | 24811.6 | 26077.1 | 26077.8 |
| NO: 31 | GDS-ppan-MC-MMAF- | NO: 1271 | | | | | 26058.3 |
| | LSWLLRLLN-V110 | | | | | | 26096.4 |
| SEQ ID | anti-hHER2-LC-V110- | SEQ ID | 5 | 1.9 | 24811.6 | 26077.1 | 26076.4 |
| NO: 32 | GDS-ppan-MC-MMAF- | NO: 1272 | | | | | |
| | LSWLLRLLN-A111 | | | | | | |
| SEQ ID | anti-hHER2-LC-A111- | SEQ ID | 13 | 2.0 | 24811.6 | 26077.1 | 26075.6 |
| NO: 33 | GDS-ppan-MC-MMAF- | NO: 1273 | | | | | |
| | LSWLLRLLN-A112 | | | | | | |
| SEQ ID | anti-hHER2-LC-P119- | SEQ ID | 1 | N/A | 24811.6 | 26077.1 | N/A |
| NO: 34 | GDS-ppan-MC-MMAF- | NO: 1274 | | | | | |
| | LSWLLRLLN-P120 | | | | | | |
| SEQ ID | anti-hHER2-LC-D122- | SEQ ID | 1 | N/A | 24811.6 | 26077.1 | N/A |
| NO: 37 | GDS-ppan-MC-MMAF- | NO: 1275 | | | | | |
| | LSWLLRLLN-E123 | | | | | | |
| SEQ ID | anti-hHER2-LC-Y140- | SEQ ID | 3 | 0.8 | 24811.6 | 26077.1 | 26077.2 |
| NO: 38 | GDS-ppan-MC-MMAF- | NO: 1276 | | | | | |
| | LSWLLRLLN-P141 | | | | | | |
| SEQ ID | anti-hHER2-LC-P141- | SEQ ID | 3 | 0.3 | 24811.6 | 26077.1 | 26076.8 |
| NO: 39 | GDS-ppan-MC-MMAF- | NO: 1277 | | | | | |
| | LSWLLRLLN-R142 | | | | | | |
| SEQ ID | anti-hHER2-LC-R142- | SEQ ID | 5 | 0.3 | 24811.6 | 26077.1 | 26077.7 |
| NO: 40 | GDS-ppan-MC-MMAF- | NO: 1278 | | | | | 24811.8 |
| | LSWLLRLLN-E143 | | | | | | 26097.2 |
| SEQ ID | anti-hHER2-LC-E143- | SEQ ID | 6 | 0.4 | 24811.6 | 26077.1 | 26075.6 |
| NO: 41 | GDS-ppan-MC-MMAF- | NO: 1279 | | | | | 26097.6 |
| | LSWLLRLLN-A144 | | | | | | |
| SEQ ID | anti-hHER2-LC-D151- | SEQ ID | 16 | 0.3 | 24811.6 | 26077.1 | 24811.7 |
| NO: 42 | GDS-ppan-MC-MMAF- | NO: 1280 | | | | | 26077.3 |
| | LSWLLRLLN-N152 | | | | | | 24829.7 |
| SEQ ID | anti-hHER2-LC-N152- | SEQ ID | 5 | 1.0 | 24811.6 | 26077.1 | 26077.2 |
| NO: 43 | GDS-ppan-MC-MMAF- | NO: 1281 | | | | | |
| | LSWLLRLLN-A153 | | | | | | |
| SEQ ID | anti-hHER2-LC-A153- | SEQ ID | 13 | 1.9 | 24811.6 | 26077.1 | 26077.7 |
| NO: 44 | GDS-ppan-MC-MMAF- | NO: 1282 | | | | | 26096.6 |
| | LSWLLRLLN-L154 | | | | | | |
| SEQ ID | anti-hHER2-LC-L154- | SEQ ID | 21 | 1.2 | 24811.6 | 26077.1 | 26078.2 |
| NO: 45 | GDS-ppan-MC-MMAF- | NO: 1283 | | | | | 26096.9 |
| | LSWLLRLLN-Q155 | | | | | | |
| SEQ ID | anti-hHER2-LC-Q155- | SEQ ID | 14 | 2.0 | 24811.6 | 26077.1 | 26075.2 |
| NO: 46 | GDS-ppan-MC-MMAF- | NO: 1284 | | | | | |
| | LSWLLRLLN-S156 | | | | | | |
| SEQ ID | anti-hHER2-LC-E161- | SEQ ID | 19 | 1.9 | 24811.6 | 26077.1 | 26077.6 |
| NO: 47 | GDS-ppan-MC-MMAF- | NO: 1285 | | | | | 26097.6 |
| | LSWLLRLLN-S162 | | | | | | |
| SEQ ID | anti-hHER2-LC-S162- | SEQ ID | 17 | 0.7 | 24811.6 | 26077.1 | 26077.2 |
| NO: 48 | GDS-ppan-MC-MMAF- | NO: 1286 | | | | | |
| | LSWLLRLLN-V163 | | | | | | |
| SEQ ID | anti-hHER2-LC-T164- | SEQ ID | 14 | 0.0 | 24811.6 | 26077.1 | 24810.0 |
| NO: 50 | GDS-ppan-MC-MMAF- | NO: 1287 | | | | | |
| | LSWLLRLLN-E165 | | | | | | |
| SEQ ID | anti-hHER2-LC-E165- | SEQ ID | 0 | N/A | 24811.6 | 26077.1 | N/A |
| NO: 51 | GDS-ppan-MC-MMAF- | NO: 1288 | | | | | |
| | LSWLLRLLN-Q166 | | | | | | |
| SEQ ID | anti-hHER2-LC-Q166- | SEQ ID | 17 | 0.0 | 24811.6 | 26077.1 | 24810.4 |
| NO: 52 | GDS-ppan-MC-MMAF- | NO: 1289 | | | | | 24832.4 |
| | LSWLLRLLN-D167 | | | | | | |
| SEQ ID | anti-hHER2-LC-D167- | SEQ ID | 24 | 0.7 | 24811.6 | 26077.1 | 26077.4 |
| NO: 53 | GDS-ppan-MC-MMAF- | NO: 1290 | | | | | 24812.3 |
| | LSWLLRLLN-S168 | | | | | | 26096.5 |
| SEQ ID | anti-hHER2-LC-T197- | SEQ ID | 8 | 1.2 | 24811.6 | 26077.1 | 24812.0 |
| NO: 54 | GDS-ppan-MC-MMAF- | NO: 1291 | | | | | 26077.9 |
| | LSWLLRLLN-H198 | | | | | | 24831.4 |
| SEQ ID | anti-hHER2-LC-Q199- | SEQ ID | 5 | 1.9 | 24811.6 | 26077.1 | 26076.0 |
| NO: 56 | GDS-ppan-MC-MMAF- | NO: 1292 | | | | | |
| | LSWLLRLLN-G200 | | | | | | |
| SEQ ID | anti-hHER2-LC-S202- | SEQ ID | 8 | 2.0 | 24811.6 | 26077.1 | 26077.4 |
| NO: 59 | GDS-ppan-MC-MMAF- | NO: 1293 | | | | | 26095.9 |
| | LSWLLRLLN-S203 | | | | | | |
| SEQ ID | anti-hHER2-LC-V110- | SEQ ID | 15 | 2.0 | 24618.4 | 25883.9 | 25883.2 |
| NO: 63 | DS-ppan-MC-MMAF- | NO: 1294 | | | | | |
| | LEFIASKLA-A111 | | | | | | |
| SEQ ID | anti-hHER2-LC-A111- | SEQ ID | 17 | 1.6 | 24618.4 | 25883.9 | 25881.2 |
| NO: 64 | DS-ppan-MC-MMAF- | NO: 1295 | | | | | |
| | LEFIASKLA-A112 | | | | | | |
| SEQ ID | anti-hHER2-LC-P119- | SEQ ID | 13 | 0.0 | 24618.4 | 25883.9 | 24618.1 |
| NO: 65 | DS-ppan-MC-MMAF- | NO: 1296 | | | | | 24637.6 |
| | LEFIASKLA-P120 | | | | | | |
| SEQ ID | anti-hHER2-LC-P120- | SEQ ID | 9 | 0.0 | 24618.4 | 25883.9 | 24617.2 |
| NO: 66 | DS-ppan-MC-MMAF- | NO: 1297 | | | | | |
| | LEFIASKLA-S121 | | | | | | |
| SEQ ID | anti-hHER2-LC-S121- | SEQ ID | 4 | 0.0 | 24618.4 | 25883.9 | 24616.8 |
| NO: 67 | DS-ppan-MC-MMAF- | NO: 1298 | | | | | |
| | LEFIASKLA-D122 | | | | | | |
| SEQ ID | anti-hHER2-LC-D122- | SEQ ID | 2 | 0.0 | 24618.4 | 25883.9 | 24616.8 |
| NO: 68 | DS-ppan-MC-MMAF- | NO: 1299 | | | | | |
| | LEFIASKLA-E123 | | | | | | |
| SEQ ID | anti-hHER2-LC-Y140- | SEQ ID | 5 | 0.1 | 24618.4 | 25883.9 | 24616.4 |
| NO: 69 | DS-ppan-MC-MMAF- | NO: 1300 | | | | | |
| | LEFIASKLA-P141 | | | | | | |
| SEQ ID | anti-hHER2-LC-R142- | SEQ ID | 13 | 0.1 | 24618.4 | 25883.9 | 24618.8 |
| NO: 71 | DS-ppan-MC-MMAF- | NO: 1301 | | | | | 25884.0 |
| | LEFIASKLA-E143 | | | | | | 24639.3 |
| SEQ ID | anti-hHER2-LC-E143- | SEQ ID | 10 | 0.0 | 24618.4 | 25883.9 | 24616.8 |
| NO: 72 | DS-ppan-MC-MMAF- | NO: 1302 | | | | | |
| | LEFIASKLA-A144 | | | | | | |
| SEQ ID | anti-hHER2-LC-D151- | SEQ ID | 17 | 0.0 | 24618.4 | 25883.9 | 24617.2 |
| NO: 73 | DS-ppan-MC-MMAF- | NO: 1303 | | | | | |
| | LEFIASKLA-N152 | | | | | | |
| SEQ ID | anti-hHER2-LC-N152- | SEQ ID | 17 | 0.0 | 24618.4 | 25883.9 | 24616.8 |
| NO: 74 | DS-ppan-MC-MMAF- | NO: 1304 | | | | | |
| | LEFIASKLA-A153 | | | | | | |
| SEQ ID | anti-hHER2-LC-A153- | SEQ ID | 20 | 1.8 | 24618.4 | 25883.9 | 25882.8 |
| NO: 75 | DS-ppan-MC-MMAF- | NO: 1305 | | | | | |
| | LEFIASKLA-L154 | | | | | | |
| SEQ ID | anti-hHER2-LC-L154-DS- | SEQ ID | 25 | 0.6 | 24618.4 | 25883.9 | 25884.6 |
| NO: 76 | ppan-MC-MMAF- | NO: 1306 | | | | | 24618.9 |
| | LEFIASKLA-Q155 | | | | | | 25904.2 |
| SEQ ID | anti-hHER2-LC-Q155- | SEQ ID | 27 | 1.1 | 24618.4 | 25883.9 | 25883.9 |
| NO: 77 | DS-ppan-MC-MMAF- | NO: 1307 | | | | | 24619.0 |
| | LEFIASKLA-S156 | | | | | | 25903.2 |
| SEQ ID | anti-hHER2-LC-S162- | SEQ ID | 7 | 0.0 | 24618.4 | 25883.9 | 24616.4 |
| NO: 79 | DS-ppan-MC-MMAF- | NO: 1308 | | | | | |
| | LEFIASKLA-V163 | | | | | | |
| SEQ ID | anti-hHER2-LC-T164-DS- | SEQ ID | 10 | 0.0 | 24618.4 | 25883.9 | 24616.4 |
| NO: 81 | ppan-MC-MMAF- | NO: 1309 | | | | | |
| | LEFIASKLA-E165 | | | | | | |
| SEQ ID | anti-hHER2-LC-E165- | SEQ ID | 29 | 0.0 | 24618.4 | 25883.9 | 24618.9 |
| NO: 82 | DS-ppan-MC-MMAF- | NO: 1310 | | | | | 24639.4 |
| | LEFIASKLA-Q166 | | | | | | |
| SEQ ID | anti-hHER2-LC-Q166- | SEQ ID | 20 | 0.0 | 24618.4 | 25883.9 | 24617.2 |
| NO: 83 | DS-ppan-MC-MMAF- | NO: 1311 | | | | | |
| | LEFIASKLA-D167 | | | | | | |
| SEQ ID | anti-hHER2-LC-D167- | SEQ ID | 28 | 0.0 | 24618.4 | 25883.9 | 24618.8 |
| NO: 84 | DS-ppan-MC-MMAF- | NO: 1312 | | | | | 24639.0 |
| | LEFIASKLA-S168 | | | | | | |
| SEQ ID | anti-hHER2-LC-T197-DS- | SEQ ID | 5 | 0.0 | 24618.4 | 25883.9 | 24615.2 |
| NO: 85 | ppan-MC-MMAF- | NO: 1313 | | | | | |
| | LEFIASKLA-H198 | | | | | | |
| SEQ ID | anti-hHER2-LC-Q199- | SEQ ID | 7 | 0.0 | 24618.4 | 25883.9 | 24617.2 |
| NO: 87 | DS-ppan-MC-MMAF- | NO: 1314 | | | | | |
| | LEFIASKLA-G200 | | | | | | |
| SEQ ID | anti-hHER2-LC-G200- | SEQ ID | 18 | 0.2 | 24618.4 | 25883.9 | 24618.8 |
| NO: 88 | DS-ppan-MC-MMAF- | NO: 1315 | | | | | 25884.4 |
| | LEFIASKLA-L201 | | | | | | 24638.9 |
| SEQ ID | anti-hHER2-LC-L201-DS- | SEQ ID | 15 | 0.8 | 24618.4 | 25883.9 | 25884.0 |
| NO: 89 | ppan-MC-MMAF- | NO: 1316 | | | | | |
| | LEFIASKLA-S202 | | | | | | |

^{a}Name represents part of the HC or LC that contains the peptide tag with the attached compound, the paired wildtype chain is not listed.
^{b}Yield of antibody per liter culture (based on 35 mL cultures) measured after protein A purification.
^{c}Drug-to-antibody ratio according to HPLC.
^{d}Mass in Dalton as predicted for the antibody.
^{e}Mass in Dalton as predicted for the ADC.
^{f}Mass in Dalton as detected on an Agilent 6520 Q-TOF instrument (Agilent Technologies). Most prominent observation is listed first.
^{g}Observed mass corresponds to non-clipped C-terminal lysine residue of heavy chain.
n.d., not determined. The drug-to-antibody ratio could not be determined accurately be HPLC because of peak overlap.
N/A, not applicable. Conjugation was not attempted or data could not be obtained because of low yield.

### Example 26

### Scale Up of Selected Peptide-Tagged ADCs for Pharmacokinetic (PK) Studies and Further Characterization

[0896] The PEPP system does not provide enough quantities of peptide-tagged ADCs for PK studies. Subsequently, expression of 97 constructs (Table 22) selected from among the 183 antibodies tested in Example 25 (Table 21) was scaled up to 200-1000 mL culture volume. Selection criteria for scale-up were high conjugation efficiency, reasonable expression yield, confirmed in vitro potency, and low aggregation level as observed for the ADCs prepared in Example 25.

[0897] After expression of the selected S6/ybbR-tagged antibodies in Freestyle™ expression media (Invitrogen) for five days at 37° C. under 5% CO₂, the cultures were harvested by centrifugation, and the resulting medium supernatants were passed through 0.22 μm filters (EMD Millipore). Antibody expression was verified by SDS-PAGE analysis. Next, the filtrates were loaded at a flowrate of 0.5-1 mL/min onto PBS-equilibrated columns containing 0.5 mL of Protein A resin by using a MINIPULS Evolution peristaltic pump (Gilson Inc.). After washing the columns with 100-200 column volumes of PBS, the antibody constructs were eluted with 0.1 M sodium acetate (pH 3.0) in two 2.5 mL fractions. Both fractions were immediately neutralized with 25-38% (v/v) of Tris-HCl buffer (1 M, pH 8.0). In order to determine the yield of the Protein A-purified antibodies (Table 22), protein concentrations of the eluates were measured in duplicate on a ND-1000 UV-Vis Spectrophotometer (NanoDrop Technologies) at 280 nm according to the preset molar extinction coefficient for IgG molecules. Using Slide-A-Lyzer Dialysis Cassettes (3.5-7.0 kDa cut-off, Pierce), the second elution fraction of each construct was dialyzed into PBS for subsequent thermostability measurements of non-conjugated antibodies by DSF (Table 23). The first elution fraction of each peptide-tagged antibody was dialyzed into conjugation buffer (75 mM Tris-HCl buffer at pH 8.0 supplemented with 20 mM NaCl and 12.5 mM MgCl₂). After adjusting the antibody concentration to 2.5 μM, conjugation reactions were initiated by addition of CoA-MC-MMAF and Sfp enzyme to final concentrations of 30-60 μM and 1-4 μM, respectively. The enzymatic reaction was allowed to proceed for about 16-20 hours at room temperature, before verifying the degree of labeling by analytical reverse-phase HPLC using the respective uncoupled antibody as control (Table 22). All conjugation reactions were analyzed by mass spectrometry on an Agilent 6520 Q-TOF instrument (Table 22). After confirming near quantitative conjugation, reaction mixtures were concentrated to a final volume of 1 mL using 30 kDa cut-off Amicon Ultra centrifugal filter devices (EMD Millipore). Following removal of precipitate by centrifugation, Sfp enzyme and excess CoA-MC-MMAF substrate were removed by SEC (size-exclusion chromatography) on a HiLoad 26/60 Superdex 200 prep grade column (GE Healthcare) in PBS at a flowrate of 1 mL/min. The purity of the peptide-tagged ADCs after SEC was assessed by reverse-phase HPLC. After 0.22 μm filtration, the final yields of the ADCs were determined using triplicate measurements on a ND-1000 UV-Vis Spectrophotometer (NanoDrop Technologies) as above (Table 22).

TABLE 22
ADC production and characterization from 200-400 mL scale-up culture.

| | | | Anti- | | | | | |
|---|---|---|---|---|---|---|---|---|
| Anti- | | ADC | body | ADC | | Mono- | Expt. | Obs. |
| body | | SEQ ID | yield^{b} | yield^{c} | | mer^{e} | mass^{f} | mass^{g} |
| SEQ ID | ADC name^{a} | NO | (mg/L) | (mg/L) | DAR^{d} | (%) | (Da) | (Da) |
| SEQ ID | anti-hHER2-HC-S119- | SEQ ID | 57 | 31 | 2.0 | 97 | 51790.5 | 51786.4 |
| NO: 151 | GDS-ppan-MC-MMAF- | NO: 1137 | | | | | | |
| | LSWLLRLLN-T120 | | | | | | | |
| SEQ ID | anti-hHER2-HC-T120- | SEQ ID | 40 | 23 | 2.0 | 100 | 51790.5 | 51796.4 |
| NO: 152 | GDS-ppan-MC-MMAF- | NO: 1138 | | | | | | |
| | LSWLLRLLN-K121 | | | | | | | |
| SEQ ID | anti-hHER2-HC-T135- | SEQ ID | 41 | 20 | 2.0 | 100 | 51790.5 | 51785.2 |
| NO: 157 | GDS-ppan-MC-MMAF- | NO: 1139 | | | | | | |
| | LSWLLRLLN-S136 | | | | | | | |
| SEQ ID | anti-hHER2-HC-S136- | SEQ ID | 40 | 20 | 2.0 | 100 | 51790.5 | 51785.6 |
| NO: 158 | GDS-ppan-MC-MMAF- | NO: 1140 | | | | | | |
| | LSWLLRLLN-G137 | | | | | | | |
| SEQ ID | anti-hHER2-HC-A162- | SEQ ID | 25 | 16 | 2.0 | 100 | 51790.5 | 51791.6 |
| NO: 166 | GDS-ppan-MC-MMAF- | NO: 1147 | | | | | | |
| | LSWLLRLLN-L163 | | | | | | | |
| SEQ ID | anti-hHER2-HC-T164- | SEQ ID | 32 | 15 | 2.0 | 100 | 51790.5 | 51787.6 |
| NO: 168 | GDS-ppan-MC-MMAF- | NO: 1148 | | | | | | |
| | LSWLLRLLN-S165 | | | | | | | |
| SEQ ID | anti-hHER2-HC-S165- | SEQ ID | 39 | 21 | 2.0 | 100 | 51790.5 | 51786.4 |
| NO: 169 | GDS-ppan-MC-MMAF- | NO: 1149 | | | | | | |
| | LSWLLRLLN-G166 | | | | | | | |
| SEQ ID | anti-hHER2-HC-P189- | SEQ ID | 36 | 25 | 2.0 | 100 | 51790.5 | 51792.0 |
| NO: 173 | GDS-ppan-MC-MMAF- | NO: 1152 | | | | | | |
| | LSWLLRLLN-S190 | | | | | | | |
| SEQ ID | anti-hHER2-HC-G194- | SEQ ID | 35 | 21 | 2.0 | 100 | 51790.5 | 51794.8 |
| NO: 178 | GDS-ppan-MC-MMAF- | NO: 1156 | | | | | | |
| | LSWLLRLLN-T195 | | | | | | | |
| SEQ ID | anti-hHER2-HC-T195- | SEQ ID | 39 | 21 | 1.9 | 100 | 51790.5 | 51790.4 |
| NO: 179 | GDS-ppan-MC-MMAF- | NO: 1157 | | | | | | |
| | LSWLLRLLN-Q196 | | | | | | | |
| SEQ ID | anti-hHER2-HC-P271- | SEQ ID | 9 | 4 | 1.9 | 100 | 51790.5 | 51782.0 |
| NO: 202 | GDS-ppan-MC-MMAF- | NO: 1172 | | | | | | |
| | LSWLLRLLN-E272 | | | | | | | |
| SEQ ID | anti-hHER2-HC-A330- | SEQ ID | 30 | 14 | 1.8 | 100 | 51790.5 | 51796.4 |
| NO: 218 | GDS-ppan-MC-MMAF- | NO: 1181 | | | | | | 50526.8^{h} |
| | LSWLLRLLN-P331 | | | | | | | |
| SEQ ID | anti-hHER2-HC-K340- | SEQ ID | 20 | 9 | 2.0 | 100 | 51790.5 | 51794.4 |
| NO: 220 | GDS-ppan-MC-MMAF- | NO: 1182 | | | | | | 51918.4ⁱ |
| | LSWLLRLLN-G341 | | | | | | | |
| SEQ ID | anti-hHER2-HC-G341- | SEQ ID | 47 | 26 | 1.9 | 100 | 51790.5 | 51794.8 |
| NO: 221 | GDS-ppan-MC-MMAF- | NO: 1183 | | | | | | |
| | LSWLLRLLN-Q342 | | | | | | | |
| SEQ ID | anti-hHER2-HC-R344- | SEQ ID | 37 | 21 | 2.0 | 100 | 51790.5 | 51795.6 |
| NO: 224 | GDS-ppan-MC-MMAF- | NO: 1186 | | | | | | |
| | LSWLLRLLN-E345 | | | | | | | |
| SEQ ID | anti-hHER2-HC-K360- | SEQ ID | 46 | 21 | 1.9 | 100 | 51790.5 | 51785.2 |
| NO: 229 | GDS-ppan-MC-MMAF- | NO: 1187 | | | | | | |
| | LSWLLRLLN-N361 | | | | | | | |
| SEQ ID | anti-hHER2-HC-E388- | SEQ ID | 40 | 25 | 2.0 | 100 | 51790.5 | 51792.4 |
| NO: 127 | GDS-ppan-MC-MMAF- | NO: 1118 | | | | | | |
| | LSWLLRLLN-N389 | | | | | | | |
| SEQ ID | anti-hHER2-HC-Q418- | SEQ ID | 55 | 26 | 2.0 | 100 | 51790.5 | 51786.8 |
| NO: 239 | GDS-ppan-MC-MMAF- | NO: 1195 | | | | | | 51914.4ⁱ |
| | LSWLLRLLN-Q419 | | | | | | | |
| SEQ ID | anti-hHER2-HC-N434- | SEQ ID | 41 | 10 | 1.9 | n.d. | 51790.5 | 51785.2 |
| NO: 244 | GDS-ppan-MC-MMAF- | NO: 1197 | | | | | | 51912.8ⁱ |
| | LSWLLRLLN-H435 | | | | | | | |
| SEQ ID | anti-hHER2-HC-P445- | SEQ ID | 9 | 3 | 1.9 | 100 | 51790.5 | 51783.2 |
| NO: 248 | GDS-ppan-MC-MMAF- | NO: 1199 | | | | | | 51910.8ⁱ |
| | LSWLLRLLN-G446 | | | | | | | |
| SEQ ID | anti-hHER2-HC-S119- | SEQ ID | 35 | 25 | 1.9 | 100 | 51597.3 | 51591.2 |
| NO: 250 | DS-ppan-MC-MMAF- | NO: 1201 | | | | | | |
| | LEFIASKLA-T120 | | | | | | | |
| SEQ ID | anti-hHER2-HC-T120- | SEQ ID | 42 | 24 | 1.9 | 100 | 51597.3 | 51592.4 |
| NO: 251 | DS-ppan-MC-MMAF- | NO: 1202 | | | | | | |
| | LEFIASKLA-K121 | | | | | | | |
| SEQ ID | anti-hHER2-HC-S136- | SEQ ID | 33 | 20 | 1.9 | 100 | 51597.3 | 51602.0 |
| NO: 257 | DS-ppan-MC-MMAF- | NO: 1203 | | | | | | |
| | LEFIASKLA-137 | | | | | | | |
| SEQ ID | anti-hHER2-HC-G138- | SEQ ID | 26 | 14 | 1.9 | 100 | 51597.3 | 51592.0 |
| NO: 259 | DS-ppan-MC-MMAF- | NO: 1204 | | | | | | |
| | LEFIASKLA-T139 | | | | | | | |
| SEQ ID | anti-hHER2-HC-S165- | SEQ ID | 33 | 21 | 1.9 | 100 | 51597.3 | 51595.2 |
| NO: 268 | DS-ppan-MC-MMAF- | NO: 1209 | | | | | | |
| | LEFIASKLA-G166 | | | | | | | |
| SEQ ID | anti-hHER2-HC-G194- | SEQ ID | 24 | 14 | 1.9 | 100 | 51597.3 | 51592.4 |
| NO: 277 | DS-ppan-MC-MMAF- | NO: 1215 | | | | | | |
| | LEFIASKLA-T195 | | | | | | | |
| SEQ ID | anti-hHER2-HC-L328- | SEQ ID | 35 | 22 | 1.9 | 100 | 51597.3 | 51600.4 |
| NO: 315 | DS-ppan-MC-MMAF- | NO: 1243 | | | | | | |
| | LEFIASKLA-P329 | | | | | | | |
| SEQ ID | anti-hHER2-HC-A330- | SEQ ID | 20 | 12 | 1.8 | 100 | 51597.3 | 51589.2 |
| NO: 317 | DS-ppan-MC-MMAF- | NO: 1245 | | | | | | 50323.6^{h} |
| | LEFIASKLA-P331 | | | | | | | |
| SEQ ID | anti-hHER2-HC-E388- | SEQ ID | 51 | 28 | 1.9 | 100 | 51597.3 | 51592.0 |
| NO: 129 | DS-ppan-MC-MMAF- | NO: 1122 | | | | | | |
| | LEFIASKLA-N389 | | | | | | | |
| SEQ ID | anti-hHER2-HC-G446- | SEQ ID | 37 | 23 | 1.9 | 100 | 51597.3 | 51590.4 |
| NO: 349 | DS-ppan-MC-MMAF- | NO: 1270 | | | | | | |
| | LEFIASKLA-K447 | | | | | | | |
| SEQ ID | anti-hHER2-LC-V110- | SEQ ID | 8 | 3 | 2.0 | 93 | 26077.1 | 26074.8 |
| NO: 32 | GDS-ppan-MC-MMAF- | NO: 1272 | | | | | | |
| | LSWLLRLLN-A111 | | | | | | | |
| SEQ ID | anti-hHER2-LC-A111- | SEQ ID | 20 | 13 | 2.0 | 100 | 26077.1 | 26073.6 |
| NO: 33 | GDS-ppan-MC-MMAF- | NO: 1273 | | | | | | |
| | LSWLLRLLN-A112 | | | | | | | |
| SEQ ID | anti-hHER2-LC-Q155- | SEQ ID | 29 | 19 | 1.9 | 100 | 26077.1 | 26070.8 |
| NO: 46 | GDS-ppan-MC-MMAF- | NO: 1284 | | | | | | |
| | LSWLLRLLN-S156 | | | | | | | |
| SEQ ID | anti-hHER2-LC-S162- | SEQ ID | 9 | 5 | 1.9 | 100 | 26077.1 | 26076.0 |
| NO: 48 | GDS-ppan-MC-MMAF- | NO: 1251 | | | | | | |
| | LSWLLRLLN-V163 | | | | | | | |
| SEQ ID | anti-hHER2-LC-Q199- | SEQ ID | 10 | 3 | 1.9 | 100 | 26077.1 | 26074.4 |
| NO: 56 | GDS-ppan-MC-MMAF- | NO: 1292 | | | | | | |
| | LSWLLRLLN-G200 | | | | | | | |
| SEQ ID | anti-hHER2-LC-V110- | SEQ ID | 53 | 30 | 1.9 | 100 | 25883.9 | 25880.8 |
| NO: 63 | DS-ppan-MC-MMAF- | NO: 1294 | | | | | | |
| | LEFIASKLA-A111 | | | | | | | |
| SEQ ID | anti-hHER2-LC-A111- | SEQ ID | 12 | 8 | 1.9 | 100 | 25883.9 | 25880.4 |
| NO: 64 | DS-ppan-MC-MMAF- | NO: 1295 | | | | | | 25901.2^{j} |
| | LEFIASKLA-A112 | | | | | | | |
| SEQ ID | anti-hHER2-LC-A153- | SEQ ID | 14 | 7 | 1.9 | 100 | 25883.9 | 25878.0 |
| NO: 75 | DS-ppan-MC-MMAF- | NO: 1305 | | | | | | |
| | LEFIASKLA-L154 | | | | | | | |
| SEQ ID | anti-hHER2-LC-L201-DS- | SEQ ID | 26 | 15 | 1.8 | 100 | 25883.9 | 25881.2 |
| NO: 89 | ppan-MC-MMAF- | NO: 1316 | | | | | | |
| | LEFIASKLA-S202 | | | | | | | |
| SEQ ID | anti-hHER2-HC-N389- | SEQ ID | 23 | 14 | 1.9 | 100 | 51597.3 | 51592.7 |
| NO: 330 | DS-ppan-MC-MMAF- | NO: 1256 | | | | | | |
| | LEFIASKLA-N390 | | | | | | | |
| SEQ ID | anti-hHER2-HC-R255- | SEQ ID | 20 | 7 | 2.0 | 100 | 51790.5 | 51786.1 |
| NO: 195 | GDS-ppan-MC-MMAF- | NO: 1167 | | | | | | 51727.9^{k} |
| | LSWLLRLLN-T256 | | | | | | | |
| SEQ ID | anti-hHER2-HC-P291- | SEQ ID | 28 | 16 | 1.9 | 100 | 51790.5 | 51786.8 |
| NO: 206 | GDS-ppan-MC-MMAF- | NO: 1173 | | | | | | |
| | LSWLLRLLN-R292 | | | | | | | |
| SEQ ID | anti-hHER2-HC-L235- | SEQ ID | 28 | 18 | 2.0 | 100 | 51597.3 | 51593.9 |
| NO: 288 | DS-ppan-MC-MMAF- | NO: 1221 | | | | | | 50407.9^{l} |
| | LEFIASKLA-G236 | | | | | | | |
| SEQ ID | anti-hHER2-HC-A118- | SEQ ID | 24 | 15 | 1.9 | 100 | 51597.3 | 51595.9 |
| NO: 249 | DS-ppan-MC-MMAF- | NO: 1200 | | | | | | |
| | LEFIASKLA-S119 | | | | | | | |
| SEQ ID | anti-hHER2-HC-R344- | SEQ ID | 23 | 13 | 1.9 | 100 | 51597.3 | 51594.6 |
| NO: 323 | DS-ppan-MC-MMAF- | NO: 1251 | | | | | | |
| | LEFIASKLA-E345 | | | | | | | |
| SEQ ID | anti-hHER2-HC-P343- | SEQ ID | 24 | 15 | 1.9 | 100 | 51597.3 | 51594.6 |
| NO: 322 | DS-ppan-MC-MMAF- | NO: 1250 | | | | | | |
| | LEFIASKLA-R344 | | | | | | | |
| SEQ ID | anti-hHER2-HC-P271- | SEQ ID | 21 | 13 | 1.9 | 100 | 51597.3 | 51594.1 |
| NO: 301 | DS-ppan-MC-MMAF- | NO: 1233 | | | | | | |
| | LEFIASKLA-E272 | | | | | | | |
| SEQ ID | anti-hHER2-HC-Q196- | SEQ ID | 12 | 7 | 1.9 | 100 | 51597.3 | 51595.9 |
| NO: 279 | DS-ppan-MC-MMAF- | NO: 1217 | | | | | | |
| | LEFIASKLA-T197 | | | | | | | |
| SEQ ID | anti-hHER2-HC-S254- | SEQ ID | 19 | 11 | 2.0 | 100 | 51597.3 | 51595.3 |
| NO: 293 | DS-ppan-MC-MMAF- | NO: 1226 | | | | | | |
| | LEFIASKLA-R255 | | | | | | | |
| SEQ ID | anti-hHER2-HC-S254- | SEQ ID | 23 | 3 | 2.0 | n.d. | 51790.5 | 51788.3 |
| NO: 194 | GDS-ppan-MC-MMAF- | NO: 1166 | | | | | | 51597.3^{j} |
| | LSWLLRLLN-R255 | | | | | | | 51729.3^{k} |
| SEQ ID | anti-hHER2-HC-R416- | SEQ ID | 22 | 10 | 2.0 | 100 | 51597.3 | 51595.0 |
| NO: 337 | DS-ppan-MC-MMAF- | NO: 1261 | | | | | | 51537.0^{k} |
| | LEFIASKLA-W417 | | | | | | | |
| SEQ ID | anti-hHER2-HC-D270- | SEQ ID | 17 | 9 | 2.0 | 100 | 51790.5 | 51788.7 |
| NO: 201 | GDS-ppan-MC-MMAF- | NO: 1171 | | | | | | |
| | LSWLLRLLN-P271 | | | | | | | |
| SEQ ID | anti-hHER2-HC-A162- | SEQ ID | 20 | 14 | 1.9 | 100 | 51597.3 | 51596.6 |
| NO: 265 | DS-ppan-MC-MMAF- | NO: 1207 | | | | | | |
| | LEFIASKLA-L163 | | | | | | | |
| SEQ ID | anti-hHER2-HC-S191- | SEQ ID | 22 | 12 | 2.0 | 100 | 51597.3 | 51596.9 |
| NO: 274 | DS-ppan-MC-MMAF- | NO: 1213 | | | | | | |
| | LEFIASKLA-S192 | | | | | | | |
| SEQ ID | anti-hHER2-HC-S192- | SEQ ID | 22 | 14 | 2.0 | 100 | 51597.3 | 51597.0 |
| NO: 275 | DS-ppan-MC-MMAF- | NO: 1214 | | | | | | |
| | LEFIASKLA-L193 | | | | | | | |
| SEQ ID | anti-hHER2-HC-L193- | SEQ ID | 18 | 10 | 2.0 | 100 | 51790.5 | 51790.8 |
| NO: 177 | GDS-ppan-MC-MMAF- | NO: 1155 | | | | | | |
| | LSWLLRLLN-G194 | | | | | | | |
| SEQ ID | anti-hHER2-HC-R255- | SEQ ID | 12 | 7 | 2.0 | 100 | 51597.3 | 51595.0 |
| NO: 294 | DS-ppan-MC-MMAF- | NO: 1227 | | | | | | 51536.9^{k} |
| | LEFIASKLA-T256 | | | | | | | |
| SEQ ID | anti-hHER2-HC-H268- | SEQ ID | 13 | 6 | 2.0 | 100 | 51790.5 | 51789.1 |
| NO: 199 | GDS-ppan-MC-MMAF- | NO: 1169 | | | | | | |
| | LSWLLRLLN-E269 | | | | | | | |
| SEQ ID | anti-hHER2-HC-S267- | SEQ ID | 9 | 5 | 2.0 | 100 | 51790.5 | 51788.7 |
| NO: 198 | GDS-ppan-MC-MMAF- | NO: 1168 | | | | | | |
| | LSWLLRLLN-H268 | | | | | | | |
| SEQ ID | anti-hHER2-HC-L235- | SEQ ID | 9 | 4 | 2.0 | 100 | 51790.5 | 51789.6 |
| NO: 189 | GDS-ppan-MC-MMAF- | NO: 1163 | | | | | | |
| | LSWLLRLLN-G236 | | | | | | | |
| SEQ ID | anti-hHER2-HC-P343- | SEQ ID | 15 | 6 | 2.0 | 100 | 51790.5 | 51789.2 |
| NO: 223 | GDS-ppan-MC-MMAF- | NO: 1185 | | | | | | |
| | LSWLLRLLN-R344 | | | | | | | |
| SEQ ID | anti-hHER2-HC-1253- | SEQ ID | 7 | 3 | 1.9 | 100 | 51790.5 | 51788.9 |
| NO: 193 | GDS-ppan-MC-MMAF- | NO: 1165 | | | | | | 51729.9^{k} |
| | LSWLLRLLN-S254 | | | | | | | |
| SEQ ID | anti-hHER2-HC-P206- | SEQ ID | 30 | 15 | 1.9 | 100 | 51790.5 | 51790.1 |
| NO: 182 | GDS-ppan-MC-MMAF- | NO: 1160 | | | | | | |
| | LSWLLRLLN-S207 | | | | | | | |
| SEQ ID | anti-hHER2-HC-P257- | SEQ ID | 10 | 5 | 2.0 | 100 | 51597.3 | 51595.2 |
| NO: 296 | DS-ppan-MC-MMAF- | NO: 1228 | | | | | | |
| | LEFIASKLA-E258 | | | | | | | |
| SEQ ID | anti-hHER2-HC-T195- | SEQ ID | 12 | 6 | 2.0 | 100 | 51597.3 | 51597.3 |
| NO: 278 | DS-ppan-MC-MMAF- | NO: 1216 | | | | | | |
| | LEFIASKLA-Q196 | | | | | | | |
| SEQ ID | anti-hHER2-HC-E269- | SEQ ID | 9 | 5 | 1.9 | 100 | 51597.3 | 51595.7 |
| NO: 299 | DS-ppan-MC-MMAF- | NO: 1231 | | | | | | |
| | LEFIASKLA-D270 | | | | | | | |
| SEQ ID | anti-hHER2-HC-A118- | SEQ ID | 10 | 4 | 2.0 | 100 | 51790.5 | 51792.2 |
| NO: 150 | GDS-ppan-MC-MMAF- | NO: 1136 | | | | | | |
| | LSWLLRLLN-S119 | | | | | | | |
| SEQ ID | anti-hHER2-HC-A231- | SEQ ID | 27 | 12 | 2.0 | 100 | 51790.5 | 51789.6 |
| NO: 185 | GDS-ppan-MC-MMAF- | NO: 1161 | | | | | | |
| | LSWLLRLLN-P232 | | | | | | | |
| SEQ ID | anti-hHER2-LC-E161- | SEQ ID | 23 | 15 | 2.0 | 100 | 26077.1 | 26076.5 |
| NO: 47 | GDS-ppan-MC-MMAF- | NO: 1285 | | | | | | 25457.3^{l} |
| | LSWLLRLLN-S162 | | | | | | | |
| SEQ ID | anti-hHER2-LC-S203- | SEQ ID | 15 | 8 | 1.9 | 100 | 25883.9 | 25883.5 |
| NO: 91 | DS-ppan-MC-MMAF- | NO: 1317 | | | | | | 28925.4^{l} |
| | LEFIASKLA-P204 | | | | | | | |
| SEQ ID | anti-hHER2-LC-S203- | SEQ ID | 15 | 6 | 2.0 | 100 | 26077.1 | 26076.7 |
| NO: 60 | GDS-ppan-MC-MMAF- | NO: 1318 | | | | | | |
| | LSWLLRLLN-P204 | | | | | | | |
| SEQ ID | anti-hHER2-LC-K207- | SEQ ID | 9 | 4 | 1.9 | 100 | 26077.1 | 26076.7 |
| NO: 61 | GDS-ppan-MC-MMAF- | NO: 1319 | | | | | | |
| | LSWLLRLLN-S208 | | | | | | | |
| SEQ ID | anti-hHER2-LC-S202- | SEQ ID | 22 | 13 | 1.9 | 100 | 25883.9 | 25883.6 |
| NO: 90 | DS-ppan-MC-MMAF- | NO: 1320 | | | | | | |
| | LEFIASKLA-S203 | | | | | | | |
| SEQ ID | anti-hHER2-LC-A153- | SEQ ID | 30 | 22 | 2.0 | 100 | 26077.1 | 26075.7 |
| NO: 44 | GDS-ppan-MC-MMAF- | NO: 1282 | | | | | | 25456.0^{l} |
| | LSWLLRLLN-L154 | | | | | | | |
| SEQ ID | anti-hHER2-HC-T164- | SEQ ID | 25 | 19 | 2.0 | 100 | 51597.3 | 51597.0 |
| NO: 267 | DS-ppan-MC-MMAF- | NO: 1208 | | | | | | |
| | LEFIASKLA-S165 | | | | | | | |
| SEQ ID | anti-hHER2-HC-S192- | SEQ ID | 15 | 8 | 2.0 | 100 | 51790.5 | 51791.2 |
| NO: 176 | GDS-ppan-MC-MMAF- | NO: 1154 | | | | | | |
| | LSWLLRLLN-L193 | | | | | | | |
| SEQ ID | anti-hHER2-HC-D270- | SEQ ID | 33 | 26 | 1.9 | 100 | 51597.3 | 51595.2 |
| NO: 300 | DS-ppan-MC-MMAF- | NO: 1232 | | | | | | |
| | LEFIASKLA-P271 | | | | | | | |
| SEQ ID | anti-hHER2-HC-Q196- | SEQ ID | 27 | 17 | 2.0 | 100 | 51790.5 | 51787.2 |
| NO: 180 | GDS-ppan-MC-MMAF- | NO: 1158 | | | | | | |
| | LSWLLRLLN-T197 | | | | | | | |
| SEQ ID | anti-hHER2-HC-S191- | SEQ ID | 43 | 23 | 2.0 | 100 | 51790.5 | 51791.5 |
| NO: 175 | GDS-ppan-MC-MMAF- | NO: 1153 | | | | | | |
| | LSWLLRLLN-S192 | | | | | | | |
| SEQ ID | anti-hHER2-HC-G420- | SEQ ID | 42 | 33 | 2.0 | 100 | 51597.3 | 51595.0 |
| NO: 341 | DS-ppan-MC-MMAF- | NO: 1265 | | | | | | |
| | LEFIASKLA-N421 | | | | | | | |
| SEQ ID | anti-hHER2-HC-G236- | SEQ ID | 49 | 38 | 1.9 | 100 | 51597.3 | 51595.2 |
| NO: 289 | DS-ppan-MC-MMAF- | NO: 1222 | | | | | | 50408.8^{l} |
| | LEFIASKLA-G237 | | | | | | | |
| SEQ ID | anti-hHER2-HC-N421- | SEQ ID | 39 | 31 | 2.0 | 100 | 51597.3 | 51596.7 |
| NO: 342 | DS-ppan-MC-MMAF- | NO: 1266 | | | | | | 51725.6ⁱ |
| | LEFIASKLA-V422 | | | | | | | |
| SEQ ID | anti-hHER2-LC-Q155- | SEQ ID | 45 | 35 | 1.9 | 100 | 25883.9 | 25883.0 |
| NO: 77 | DS-ppan-MC-MMAF- | NO: 1307 | | | | | | 28925.2^{l} |
| | LEFIASKLA-S156 | | | | | | | |
| SEQ ID | anti-hHER2-LC-L154- | SEQ ID | 35 | 27 | 2.0 | 100 | 26077.1 | 26076.8 |
| NO: 45 | GDS-ppan-MC-MMAF- | NO: 1283 | | | | | | 28925.2^{l} |
| | LSWLLRLLN-Q155 | | | | | | | |
| SEQ ID | anti-hHER2-HC-R416- | SEQ ID | 8 | 4 | 2.0 | 81 | 51790.5 | 51790.9 |
| NO: 237 | GDS-ppan-MC-MMAF- | NO: 1193 | | | | | | 51917.9ⁱ |
| | LSWLLRLLN-W417 | | | | | | | |
| SEQ ID | anti-hHER2-HC-E233- | SEQ ID | 4 | 1 | 2.0 | 100 | 51790.5 | 51790.0 |
| NO: 187 | GDS-ppan-MC-MMAF- | NO: 1162 | | | | | | |
| | LSWLLRLLN-L234 | | | | | | | |
| SEQ ID | anti-hHER2-HC-G138- | SEQ ID | 17 | 12 | 2.0 | 100 | 51790.5 | 51790.1 |
| NO: 160 | GDS-ppan-MC-MMAF- | NO: 1141 | | | | | | |
| | LSWLLRLLN-T139 | | | | | | | |
| SEQ ID | anti-hHER2-HC-G161- | SEQ ID | 18 | 9 | 1.9 | 100 | 51800.5 | 51798.3 |
| NO: 370 | GDS-ppan-MC-MMAF- | NO: 1321 | | | | | | 50533.6^{h} |
| | LDMLEWSLM-A162 | | | | | | | |
| SEQ ID | anti-hHER2-HC-L163- | SEQ ID | 22 | 10 | 1.5 | 100 | 51800.5 | 51799.0 |
| NO: 372 | GDS-ppan-MC-MMAF- | NO: 1322 | | | | | | 50533.8^{h} |
| | LDMLEWSLM-T164 | | | | | | | |
| SEQ ID | anti-hHER2-HC-S165- | SEQ ID | 23 | 10 | 1.9 | 100 | 51800.5 | 51799.2 |
| NO: 374 | GDS-ppan-MC-MMAF- | NO: 1323 | | | | | | |
| | LDMLEWSLM-G166 | | | | | | | |
| SEQ ID | anti-hHER2-HC-S190- | SEQ ID | 8 | 4 | 1.8 | 100 | 51800.5 | 51799.3 |
| NO: 376 | GDS-ppan-MC-MMAF- | NO: 1324 | | | | | | 50534.1^{h} |
| | LDMLEWSLM-S191 | | | | | | | |
| SEQ ID | anti-hHER2-HC-S191- | SEQ ID | 14 | 7 | 1.9 | 100 | 51800.5 | 51799.2 |
| NO: 377 | GDS-ppan-MC-MMAF- | NO: 1325 | | | | | | |
| | LDMLEWSLM-S192 | | | | | | | |
| SEQ ID | anti-hHER2-HC-S192- | SEQ ID | 11 | 5 | 1.9 | 100 | 51800.5 | 51799.2 |
| NO: 378 | GDS-ppan-MC-MMAF- | NO: 1326 | | | | | | |
| | LDMLEWSLM-L193 | | | | | | | |
| SEQ ID | anti-hHER2-HC-G194- | SEQ ID | 16 | 9 | 1.9 | 100 | 51800.5 | 51799.0 |
| NO: 380 | GDS-ppan-MC-MMAF- | NO: 1327 | | | | | | |
| | LDMLEWSLM-T195 | | | | | | | |
| SEQ ID | anti-hHER2-HC-T195- | SEQ ID | 25 | 10 | 1.9 | 100 | 51800.5 | 51799.2 |
| NO: 381 | GDS-ppan-MC-MMAF- | NO: 1328 | | | | | | |
| | LDMLEWSLM-Q196 | | | | | | | |
| SEQ ID | anti-hHER2-LC-T109- | SEQ ID | 27 | 10 | 1.9 | 100 | 26087.1 | 26085.8 |
| NO: 383 | GDS-ppan-MC-MMAF- | NO: 1329 | | | | | | 28924.5^{l} |
| | LDMLEWSLM-V110 | | | | | | | |
| SEQ ID | anti-hHER2-LC-V110- | SEQ ID | 27 | 10 | 1.9 | 100 | 26087.1 | 26086.0 |
| NO: 384 | GDS-ppan-MC-MMAF- | NO: 1330 | | | | | | 28924.7^{l} |
| | LDMLEWSLM-A111 | | | | | | | |

^{a}Name represents part of the HC or LC that contains the peptide tag with the attached compound, the paired wildtype chain is not listed.
^{b}Yield of antibody per liter culture (based on 200-1000 mL cultures) measured after protein A purification.
^{c}Yield of ADC per liter of culture measured after size-exclusion chromatography.
^{d}Drug-to-antibody ratio according to HPLC.
^{e}Analytical size exclusion chromatography results for ADC (percent of monomer).
^{f}Mass in Dalton as predicted for the ADC.
^{g}Mass in Dalton as detected on an Agilent 6520 Q-TOF instrument (Agilent Technologies). Most prominent observation is listed first.
^{h}Observed mass corresponds to non-conjugated antibody.
ⁱObserved mass corresponds to non-clipped C-terminal lysine residue of heavy chain.
^{j}Observed mass presumably corresponds to sodium adduct.
^{k}Observed mass corresponds to clipped Gly446 residue of heavy chain.
^{l}Observed mass corresponds to an unknown species of low abundance.
^{j}Carryover peak
n.d., not determined.

[0898] Expression levels of the selected peptide-tagged antibodies averaged 25 mg per liter of cell culture (ranging from 4 to 57 mg/L) (Table 22) and the final yield of purified ADC averaged 14 mg per liter of cell culture (ranging from 1 to 38 mg/L) (Table 22). All ADCs were site-specifically conjugated with two CoA-MC-MMAF molecules at an average DAR of 1.9 (DARs ranging from 1.5 to 2.0) as verified by HPLC and MS (Table 22). No aggregation or oligomeric species were detected for 92 of 97 ADCs prepared (Table 22). All other ADCs were at least 81% monomeric as determined by analytical size exclusion chromatography (no data for two ADCs). The thermal stability of nonconjugated antibodies and ADCs was characterized by DSF (Table 23). For wild-type trastuzumab, two DSF thermal melting transitions (Tm1 and Tm2) were observed at 69.7 and 81.2° C. For 28 of 97 peptide-tagged antibodies, both transitions were within less than 3° C. of what was observed for wild-type trastuzumab. Conjugation of CoA-MC-MMAF lowered Tm1 of the ADC by on average 1.2° C. and Tm2 of the ADC by on average 0.6° C. relative to the nonconjugated antibody (Table 23). For 37 antibodies (and ADCs), the thermal stability was significantly (>3 degree C.) reduced relative to wild-type trastuzumab as illustrated by the difference in Tm1. This transition is attributed to the unfolding of the CH2 domain (amino acid residues 228-340) of an IgG and indeed most of the antibodies that are destabilized have the peptide-tag inserted at positions in the CH2 domain. Specifically, the plot of FIG. 18 illustrates that peptide tag insertions into the CH2 domain generally lead to lower Tm1 values than those of respective peptide tag insertions into the adjacent CH1 and CH3 domains of the heavy chain. As stated above, the location of the peptide tag can significantly affect the properties of the resulting antibody and ADC.

TABLE 23
Thermal stability of modified antibodies and ADCs as determined
by differential scanning fluorometry (DSF).

| | | | Anti- | Anti- | | | | | Ab − |
|---|---|---|---|---|---|---|---|---|---|
| Anti- | | ADC | body | body | ADC | ADC | | | WT |
| body | | SEQ ID | Tm1 | Tm2 | Tm1 | Tm2 | ΔTm1^{b} | ΔTm2^{b} | ΔTm1^{c} |
| SEQ ID: | ADC name^{a} | NO | (° C.) | (° C.) | (° C.) | (° C.) | (° C.) | (° C.) | (° C.) |
| SEQ ID | anti-hHER2-HC-S119- | SEQ ID | 69.8 | t.b. | 69.2 | t.b. | −0.6 | t.b. | 0.1 |
| NO: 151 | GDS-ppan-MC-MMAF- | NO: 1137 | | | | | | | |
| | LSWLLRLLN-T120 | | | | | | | | |
| SEQ ID | anti-hHER2-HC-T120- | SEQ ID | 69.1 | t.b. | 68.8 | t.b. | −0.3 | t.b. | −0.6 |
| NO: 152 | GDS-ppan-MC-MMAF- | NO: 1138 | | | | | | | |
| | LSWLLRLLN-K121 | | | | | | | | |
| SEQ ID | anti-hHER2-HC-T135- | SEQ ID | 67.6 | 81.3 | 67.1 | 81.2 | −0.5 | −0.1 | −2.1 |
| NO: 157 | GDS-ppan-MC-MMAF- | NO: 1139 | | | | | | | |
| | LSWLLRLLN-S136 | | | | | | | | |
| SEQ ID | anti-hHER2-HC-S136- | SEQ ID | 67.9 | 81.3 | 67.3 | 81.3 | −0.6 | 0 | −1.8 |
| NO: 158 | GDS-ppan-MC-MMAF- | NO: 1140 | | | | | | | |
| | LSWLLRLLN-G137 | | | | | | | | |
| SEQ ID | anti-hHER2-HC-A162- | SEQ ID | 69.3 | 80.0 | 68.9 | 79.8 | −0.3 | −0.2 | −0.4 |
| NO: 166 | GDS-ppan-MC-MMAF- | NO: 1147 | | | | | | | |
| | LSWLLRLLN-L163 | | | | | | | | |
| SEQ ID | anti-hHER2-HC-T164- | SEQ ID | 68.9 | 80.4 | 68.8 | 80.5 | −0.2 | 0.1 | −0.8 |
| NO: 168 | GDS-ppan-MC-MMAF- | NO: 1148 | | | | | | | |
| | LSWLLRLLN-S165 | | | | | | | | |
| SEQ ID | anti-hHER2-HC-S165- | SEQ ID | 69.2 | 80.4 | 68.8 | 80.2 | −0.4 | −0.2 | −0.5 |
| NO: 169 | GDS-ppan-MC-MMAF- | NO: 1149 | | | | | | | |
| | LSWLLRLLN-G166 | | | | | | | | |
| SEQ ID | anti-hHER2-HC-P189- | SEQ ID | 69.0 | 80.5 | 68.3 | 80.4 | −0.7 | −0.2 | −0.7 |
| NO: 173 | GDS-ppan-MC-MMAF- | NO: 1152 | | | | | | | |
| | LSWLLRLLN-S190 | | | | | | | | |
| SEQ ID | anti-hHER2-HC-G194- | SEQ ID | 68.7 | 80.8 | 67.6 | 80.9 | −1.1 | 0.1 | −1.0 |
| NO: 178 | GDS-ppan-MC-MMAF- | NO: 1156 | | | | | | | |
| | LSWLLRLLN-T195 | | | | | | | | |
| SEQ ID | anti-hHER2-HC-T195- | SEQ ID | 69.3 | 81.1 | 68.8 | 80.9 | −0.5 | −0.1 | −0.4 |
| NO: 179 | GDS-ppan-MC-MMAF- | NO: 1157 | | | | | | | |
| | LSWLLRLLN-Q196 | | | | | | | | |
| SEQ ID | anti-hHER2-HC-P271- | SEQ ID | 53.4 | 81.6 | 51.2 | 81.2 | −2.2 | −0.4 | −16.3 |
| NO: 202 | GDS-ppan-MC-MMAF- | NO: 1172 | | | | | | | |
| | LSWLLRLLN-E272 | | | | | | | | |
| SEQ ID | anti-hHER2-HC-A330- | SEQ ID | 52.5 | 81.5 | 49.0 | 81.1 | −3.5 | −0.3 | −17.2 |
| NO: 218 | GDS-ppan-MC-MMAF- | NO: 1181 | | | | | | | |
| | LSWLLRLLN-P331 | | | | | | | | |
| SEQ ID | anti-hHER2-HC-K340- | SEQ ID | 65.2 | 77.3 | 58.7 | 81.0 | −6.5 | 3.7 | −4.5 |
| NO: 220 | GDS-ppan-MC-MMAF- | NO: 1182 | | | | | | | |
| | LSWLLRLLN-G341 | | | | | | | | |
| SEQ ID | anti-hHER2-HC-G341- | SEQ ID | 65.0 | 76.9 | 56.0 | 81.0 | −9 | 4.2 | −4.7 |
| NO: 221 | GDS-ppan-MC-MMAF- | NO: 1183 | | | | | | | |
| | LSWLLRLLN-Q342 | | | | | | | | |
| SEQ ID | anti-hHER2-HC-R344- | SEQ ID | 58.6 | 81.4 | 57.7 | 81.2 | −0.9 | −0.2 | −11.1 |
| NO: 224 | GDS-ppan-MC-MMAF- | NO: 1186 | | | | | | | |
| | LSWLLRLLN-E345 | | | | | | | | |
| SEQ ID | anti-hHER2-HC-K360- | SEQ ID | 70.1 | 81.7 | 68.8 | 81.4 | −1.3 | −0.3 | 0.4 |
| NO: 229 | GDS-ppan-MC-MMAF- | NO: 1187 | | | | | | | |
| | LSWLLRLLN-N361 | | | | | | | | |
| SEQ ID | anti-hHER2-HC-E388- | SEQ ID | 66.4 | 81.3 | 66.2 | 80.9 | −0.2 | −0.4 | −3.3 |
| NO: 127 | GDS-ppan-MC-MMAF- | NO: 1118 | | | | | | | |
| | LSWLLRLLN-N389 | | | | | | | | |
| SEQ ID | anti-hHER2-HC-Q418- | SEQ ID | 69.0 | 81.0 | 68.3 | 81.1 | −0.7 | 0.1 | −0.7 |
| NO: 239 | GDS-ppan-MC-MMAF- | NO: 1195 | | | | | | | |
| | LSWLLRLLN-Q419 | | | | | | | | |
| SEQ ID | anti-hHER2-HC-N434- | SEQ ID | 60.5 | 81.5 | n.d. | n.d. | n.d. | n.d. | −9.2 |
| NO: 244 | GDS-ppan-MC-MMAF- | NO: 1197 | | | | | | | |
| | LSWLLRLLN-H435 | | | | | | | | |
| SEQ ID | anti-hHER2-HC-P445- | SEQ ID | 71.8 | 81.0 | 69.9 | 80.5 | −1.8 | −0.5 | 2.1 |
| NO: 248 | GDS-ppan-MC-MMAF- | NO: 1199 | | | | | | | |
| | LSWLLRLLN-G446 | | | | | | | | |
| SEQ ID | anti-hHER2-HC-S119- | SEQ ID | 70.1 | t.b. | 71.2 | t.b. | 1 | t.b. | 0.4 |
| NO: 250 | DS-ppan-MC-MMAF- | NO: 1201 | | | | | | | |
| | LEFIASKLA-T120 | | | | | | | | |
| SEQ ID | anti-hHER2-HC-T120- | SEQ ID | 70.4 | t.b. | 70.4 | t.b. | 0 | t.b. | 0.7 |
| NO: 251 | DS-ppan-MC-MMAF- | NO: 1202 | | | | | | | |
| | LEFIASKLA-K121 | | | | | | | | |
| SEQ ID | anti-hHER2-HC-S136- | SEQ ID | 69.3 | 80.8 | 68.3 | 81.0 | −1.1 | 0.2 | −0.4 |
| NO: 257 | DS-ppan-MC-MMAF- | NO: 1203 | | | | | | | |
| | LEFIASKLA-137 | | | | | | | | |
| SEQ ID | anti-hHER2-HC-G138- | SEQ ID | 69.3 | 80.9 | 68.5 | 81.2 | −0.7 | 0.2 | −0.4 |
| NO: 259 | DS-ppan-MC-MMAF- | NO: 1204 | | | | | | | |
| | LEFIASKLA-T139 | | | | | | | | |
| SEQ ID | anti-hHER2-HC-S165- | SEQ ID | 69.6 | 80.3 | 69.2 | 80.5 | −0.4 | 0.1 | −0.1 |
| NO: 268 | DS-ppan-MC-MMAF- | NO: 1209 | | | | | | | |
| | LEFIASKLA-G166 | | | | | | | | |
| SEQ ID | anti-hHER2-HC-G194- | SEQ ID | 69.3 | 81.1 | 68.5 | 80.9 | −0.9 | −0.1 | −0.4 |
| NO: 277 | DS-ppan-MC-MMAF- | NO: 1215 | | | | | | | |
| | LEFIASKLA-T195 | | | | | | | | |
| SEQ ID | anti-hHER2-HC-L328- | SEQ ID | 56.9 | 78.8 | 50.4 | 81.0 | −6.5 | 2.1 | −12.8 |
| NO: 315 | DS-ppan-MC-MMAF- | NO: 1243 | | | | | | | |
| | LEFIASKLA-P329 | | | | | | | | |
| SEQ ID | anti-hHER2-HC-A330- | SEQ ID | 54.2 | 81.1 | 51.3 | 81.2 | −2.9 | 0.1 | −15.5 |
| NO: 317 | DS-ppan-MC-MMAF- | NO: 1245 | | | | | | | |
| | LEFIASKLA-P331 | | | | | | | | |
| SEQ ID | anti-hHER2-HC-E388- | SEQ ID | 69.3 | 81.5 | 68.8 | 81.0 | −0.6 | −0.5 | −0.4 |
| NO: 129 | DS-ppan-MC-MMAF- | NO: 1122 | | | | | | | |
| | LEFIASKLA-N389 | | | | | | | | |
| SEQ ID | anti-hHER2-HC-G446- | SEQ ID | 69.9 | 81.2 | 69.9 | 80.9 | 0 | −0.4 | 0.2 |
| NO: 349 | DS-ppan-MC-MMAF- | NO: 1270 | | | | | | | |
| | LEFIASKLA-K447 | | | | | | | | |
| SEQ ID | anti-hHER2-LC-V110- | SEQ ID | 66.9 | t.b. | 66.3 | t.b. | −0.6 | t.b. | −2.8 |
| NO: 32 | GDS-ppan-MC-MMAF- | NO: 1272 | | | | | | | |
| | LSWLLRLLN-A111 | | | | | | | | |
| SEQ ID | anti-hHER2-LC-A111- | SEQ ID | 67.3 | t.b. | 66.0 | t.b. | −1.3 | t.b. | −2.4 |
| NO: 33 | GDS-ppan-MC-MMAF- | NO: 1273 | | | | | | | |
| | LSWLLRLLN-A112 | | | | | | | | |
| SEQ ID | anti-hHER2-LC-Q155- | SEQ ID | 69.4 | 80.0 | 68.7 | 79.4 | −0.7 | −0.6 | −0.3 |
| NO: 46 | GDS-ppan-MC-MMAF- | NO: 1284 | | | | | | | |
| | LSWLLRLLN-S156 | | | | | | | | |
| SEQ ID | anti-hHER2-LC-S162- | SEQ ID | 68.5 | t.b. | 67.3 | t.b. | −1.2 | t.b. | −1.2 |
| NO: 48 | GDS-ppan-MC-MMAF- | NO: 1251 | | | | | | | |
| | LSWLLRLLN-V163 | | | | | | | | |
| SEQ ID | anti-hHER2-LC-Q199- | SEQ ID | 67.5 | t.b. | 67.4 | t.b. | −0.1 | t.b. | −2.2 |
| NO: 56 | GDS-ppan-MC-MMAF- | NO: 1292 | | | | | | | |
| | LSWLLRLLN-G200 | | | | | | | | |
| SEQ ID | anti-hHER2-LC-V110- | SEQ ID | 69.0 | t.b. | 67.6 | t.b. | −1.4 | t.b. | −0.7 |
| NO: 63 | DS-ppan-MC-MMAF- | NO: 1294 | | | | | | | |
| | LEFIASKLA-A111 | | | | | | | | |
| SEQ ID | anti-hHER2-LC-A111- | SEQ ID | 69.6 | t.b. | 68.5 | t.b. | −1.1 | t.b. | −0.1 |
| NO: 64 | DS-ppan-MC-MMAF- | NO: 1295 | | | | | | | |
| | LEFIASKLA-A112 | | | | | | | | |
| SEQ ID | anti-hHER2-LC-A153- | SEQ ID | 69.6 | 79.7 | 69.0 | 79.2 | −0.5 | −0.5 | −0.1 |
| NO: 75 | DS-ppan-MC-MMAF- | NO: 1305 | | | | | | | |
| | LEFIASKLA-L154 | | | | | | | | |
| SEQ ID | anti-hHER2-LC-L201- | SEQ ID | 69.5 | 75.1 | 68.7 | 74.8 | −0.8 | −0.4 | −0.2 |
| NO: 89 | DS-ppan-MC-MMAF- | NO: 1316 | | | | | | | |
| | LEFIASKLA-S202 | | | | | | | | |
| SEQ ID | anti-hHER2-HC-N389- | SEQ ID | 67.8 | 79.1 | 67.3 | 78.7 | −0.5 | −0.5 | −1.9 |
| NO: 330 | DS-ppan-MC-MMAF- | NO: 1256 | | | | | | | |
| | LEFIASKLA-N390 | | | | | | | | |
| SEQ ID | anti-hHER2-HC-R255- | SEQ ID | 52.0 | 76.9 | 49.7 | 78.6 | −2.3 | 1.7 | −17.7 |
| NO: 195 | GDS-ppan-MC-MMAF- | NO: 1167 | | | | | | | |
| | LSWLLRLLN-T256 | | | | | | | | |
| SEQ ID | anti-hHER2-HC-P291- | SEQ ID | 56.0 | 77.3 | 65.4 | 77.9 | 9.4 | 0.6 | −13.7 |
| NO: 206 | GDS-ppan-MC-MMAF- | NO: 1173 | | | | | | | |
| | LSWLLRLLN-R292 | | | | | | | | |
| SEQ ID | anti-hHER2-HC-L235- | SEQ ID | 64.1 | 79.4 | 63.5 | 78.9 | −0.6 | −0.5 | −5.6 |
| NO: 288 | DS-ppan-MC-MMAF- | NO: 1221 | | | | | | | |
| | LEFIASKLA-G236 | | | | | | | | |
| SEQ ID | anti-hHER2-HC-A118- | SEQ ID | 68.1 | t.b. | 67.8 | t.b. | −0.3 | t.b. | −1.6 |
| NO: 249 | DS-ppan-MC-MMAF- | NO: 1200 | | | | | | | |
| | LEFIASKLA-S119 | | | | | | | | |
| SEQ ID | anti-hHER2-HC-R344- | SEQ ID | 60.5 | 79.2 | 58.4 | 78.6 | −2.1 | −0.5 | −9.2 |
| NO: 323 | DS-ppan-MC-MMAF- | NO: 1251 | | | | | | | |
| | LEFIASKLA-E345 | | | | | | | | |
| SEQ ID | anti-hHER2-HC-P343- | SEQ ID | 59.5 | 79.2 | 57.6 | 78.7 | −1.8 | −0.5 | −10.2 |
| NO: 322 | DS-ppan-MC-MMAF- | NO: 1250 | | | | | | | |
| | LEFIASKLA-R344 | | | | | | | | |
| SEQ ID | anti-hHER2-HC-P271- | SEQ ID | 53.0 | 79.8 | 49.8 | 78.0 | −3.1 | −1.8 | −16.7 |
| NO: 301 | DS-ppan-MC-MMAF- | NO: 1233 | | | | | | | |
| | LEFIASKLA-E272 | | | | | | | | |
| SEQ ID | anti-hHER2-HC-Q196- | SEQ ID | 68.2 | 77.3 | 68.2 | 77.3 | 0.0 | 0.0 | −1.5 |
| NO: 279 | DS-ppan-MC-MMAF- | NO: 1217 | | | | | | | |
| | LEFIASKLA-T197 | | | | | | | | |
| SEQ ID | anti-hHER2-HC-S254- | SEQ ID | 57.9 | 79.2 | 53.3 | 78.5 | −4.5 | −0.7 | −11.8 |
| NO: 293 | DS-ppan-MC-MMAF- | NO: 1226 | | | | | | | |
| | LEFIASKLA-R255 | | | | | | | | |
| SEQ ID | anti-hHER2-HC-S254- | SEQ ID | n.d. | n.d. | n.d. | n.d. | n.d. | n.d. | n.d. |
| NO: 194 | GDS-ppan-MC-MMAF- | NO: 1166 | | | | | | | |
| | LSWLLRLLN-R255 | | | | | | | | |
| SEQ ID | anti-hHER2-HC-R416- | SEQ ID | 67.5 | 78.8 | 66.8 | 78.5 | −0.8 | −0.3 | −2.2 |
| NO: 337 | DS-ppan-MC-MMAF- | NO: 1261 | | | | | | | |
| | LEFIASKLA-W417 | | | | | | | | |
| SEQ ID | anti-hHER2-HC-D270- | SEQ ID | 67.7 | 75.9 | 43.9 | 77.7 | −23.8 | 1.8 | −2.0 |
| NO: 201 | GDS-ppan-MC-MMAF- | NO: 1171 | | | | | | | |
| | LSWLLRLLN-P271 | | | | | | | | |
| SEQ ID | anti-hHER2-HC-A162- | SEQ ID | 69.0 | 78.2 | 68.1 | 76.4 | −0.9 | −1.7 | −0.7 |
| NO: 265 | DS-ppan-MC-MMAF- | NO: 1207 | | | | | | | |
| | LEFIASKLA-L163 | | | | | | | | |
| SEQ ID | anti-hHER2-HC-S191- | SEQ ID | 68.3 | 77.8 | 66.8 | 74.9 | −1.5 | −2.9 | −1.4 |
| NO: 274 | DS-ppan-MC-MMAF- | NO: 1213 | | | | | | | |
| | LEFIASKLA-S192 | | | | | | | | |
| SEQ ID | anti-hHER2-HC-S192- | SEQ ID | 68.4 | 78.1 | 66.9 | 76.1 | −1.4 | −1.9 | −1.3 |
| NO: 275 | DS-ppan-MC-MMAF- | NO: 1214 | | | | | | | |
| | LEFIASKLA-L193 | | | | | | | | |
| SEQ ID | anti-hHER2-HC-L193- | SEQ ID | 68.0 | 77.1 | 66.7 | 75.9 | −1.3 | −1.2 | −1.7 |
| NO: 177 | GDS-ppan-MC-MMAF- | NO: 1155 | | | | | | | |
| | LSWLLRLLN-G194 | | | | | | | | |
| SEQ ID | anti-hHER2-HC-R255- | SEQ ID | 58.4 | 79.3 | 54.4 | 78.7 | −4.1 | −0.5 | −11.3 |
| NO: 294 | DS-ppan-MC-MMAF- | NO: 1227 | | | | | | | |
| | LEFIASKLA-T256 | | | | | | | | |
| SEQ ID | anti-hHER2-HC-H268- | SEQ ID | 49.8 | 78.9 | 48.1 | 77.6 | −1.6 | −1.3 | −19.9 |
| NO: 199 | GDS-ppan-MC-MMAF- | NO: 1169 | | | | | | | |
| | LSWLLRLLN-E269 | | | | | | | | |
| SEQ ID | anti-hHER2-HC-S267- | SEQ ID | 49.1 | 78.9 | 47.4 | 78.0 | −1.7 | −0.9 | −20.6 |
| NO: 198 | GDS-ppan-MC-MMAF- | NO: 1168 | | | | | | | |
| | LSWLLRLLN-H268 | | | | | | | | |
| SEQ ID | anti-hHER2-HC-L235- | SEQ ID | 61.1 | 79.3 | 62.3 | 79.1 | 1.2 | −0.2 | −8.6 |
| NO: 189 | GDS-ppan-MC-MMAF- | NO: 1163 | | | | | | | |
| | LSWLLRLLN-G236 | | | | | | | | |
| SEQ ID | anti-hHER2-HC-P343- | SEQ ID | 56.9 | 79.0 | 55.3 | 78.4 | −1.5 | −0.6 | −12.9 |
| NO: 223 | GDS-ppan-MC-MMAF- | NO: 1185 | | | | | | | |
| | LSWLLRLLN-R344 | | | | | | | | |
| SEQ ID | anti-hHER2-HC-!253- | SEQ ID | 50.3 | 79.0 | 46.2 | 78.7 | −4.1 | −0.3 | −19.4 |
| NO: 193 | GDS-ppan-MC-MMAF- | NO: 1165 | | | | | | | |
| | LSWLLRLLN-S254 | | | | | | | | |
| SEQ ID | anti-hHER2-HC-P206- | SEQ ID | 58.8 | 63.4 | 56.1 | 61.9 | −2.7 | −1.6 | −10.9 |
| NO: 182 | GDS-ppan-MC-MMAF- | NO: 1160 | | | | | | | |
| | LSWLLRLLN-S207 | | | | | | | | |
| SEQ ID | anti-hHER2-HC-P257- | SEQ ID | 59.9 | 75.9 | 66.8 | 74.8 | 6.9 | −1.2 | −9.8 |
| NO: 296 | DS-ppan-MC-MMAF- | NO: 1228 | | | | | | | |
| | LEFIASKLA-E258 | | | | | | | | |
| SEQ ID | anti-hHER2-HC-T195- | SEQ ID | 68.4 | 77.7 | 66.8 | 75.5 | −1.6 | −2.2 | −1.3 |
| NO: 278 | DS-ppan-MC-MMAF- | NO: 1216 | | | | | | | |
| | LEFIASKLA-Q196 | | | | | | | | |
| SEQ ID | anti-hHER2-HC-E269- | SEQ ID | 53.9 | 79.4 | 69.4 | t.b. | 15.5 | t.b. | −15.8 |
| NO: 299 | DS-ppan-MC-MMAF- | NO: 1231 | | | | | | | |
| | LEFIASKLA-D270 | | | | | | | | |
| SEQ ID | anti-hHER2-HC-A118- | SEQ ID | 70.0 | t.b. | 64.6 | 79.0 | −5.3 | t.b. | 0.3 |
| NO: 150 | GDS-ppan-MC-MMAF- | NO: 1136 | | | | | | | |
| | LSWLLRLLN-S119 | | | | | | | | |
| SEQ ID | anti-hHER2-HC-A231- | SEQ ID | 60.4 | 79.2 | 69.0 | 75.1 | 8.6 | −4.1 | −9.3 |
| NO: 185 | GDS-ppan-MC-MMAF- | NO: 1161 | | | | | | | |
| | LSWLLRLLN-P232 | | | | | | | | |
| SEQ ID | anti-hHER2-LC-E161- | SEQ ID | 70.1 | 75.8 | 67.4 | t.b. | −2.7 | t.b. | 0.4 |
| NO: 47 | GDS-ppan-MC-MMAF- | NO: 1285 | | | | | | | |
| | LSWLLRLLN-S162 | | | | | | | | |
| SEQ ID | anti-hHER2-LC-S203- | SEQ ID | 68.9 | 74.0 | 66.4 | t.b. | −2.5 | t.b. | −0.8 |
| NO: 91 | DS-ppan-MC-MMAF- | NO: 1317 | | | | | | | |
| | LEFIASKLA-P204 | | | | | | | | |
| SEQ ID | anti-hHER2-LC-S203- | SEQ ID | 66.6 | t.b. | 65.4 | t.b. | −1.3 | t.b. | −3.1 |
| NO: 60 | GDS-ppan-MC-MMAF- | NO: 1318 | | | | | | | |
| | LSWLLRLLN-P204 | | | | | | | | |
| SEQ ID | anti-hHER2-LC-K207- | SEQ ID | 65.4 | t.b. | 62.8 | t.b. | −2.6 | t.b. | −4.3 |
| NO: 61 | GDS-ppan-MC-MMAF- | NO: 1319 | | | | | | | |
| | LSWLLRLLN-S208 | | | | | | | | |
| SEQ ID | anti-hHER2-LC-S202- | SEQ ID | 68.6 | t.b. | 66.9 | t.b. | −1.8 | t.b. | −1.1 |
| NO: 90 | DS-ppan-MC-MMAF- | NO: 1320 | | | | | | | |
| | LEFIASKLA-S203 | | | | | | | | |
| SEQ ID | anti-hHER2-LC-A153- | SEQ ID | | 77.8 | 66.7 | 76.1 | | −1.6 | |
| NO: 44 | GDS-ppan-MC-MMAF- | NO: 1282 | | | | | | | |
| | LSWLLRLLN-L154 | | | | | | | | |
| SEQ ID | anti-hHER2-HC-T164- | SEQ ID | 69.0 | 78.3 | 68.1 | 77.4 | −0.9 | −1.0 | −0.7 |
| NO: 267 | DS-ppan-MC-MMAF- | NO: 1208 | | | | | | | |
| | LEFIASKLA-S165 | | | | | | | | |
| SEQ ID | anti-hHER2-HC-S192- | SEQ ID | 66.4 | 77.9 | 65.5 | 74.6 | −0.9 | −3.3 | −3.3 |
| NO: 176 | GDS-ppan-MC-MMAF- | NO: 1154 | | | | | | | |
| | LSWLLRLLN-L193 | | | | | | | | |
| SEQ ID | anti-hHER2-HC-D270- | SEQ ID | 53.7 | 79.6 | 51.3 | 77.9 | −2.4 | −1.7 | −16.0 |
| NO: 300 | DS-ppan-MC-MMAF- | NO: 1232 | | | | | | | |
| | LEFIASKLA-P271 | | | | | | | | |
| SEQ ID | anti-hHER2-HC-Q196- | SEQ ID | 66.5 | 75.9 | 65.5 | 73.9 | −0.9 | −2.0 | −3.3 |
| NO: 180 | GDS-ppan-MC-MMAF- | NO: 1158 | | | | | | | |
| | LSWLLRLLN-T197 | | | | | | | | |
| SEQ ID | anti-hHER2-HC-S191- | SEQ ID | 66.3 | 77.2 | 65.7 | 77.1 | −0.6 | −0.1 | −3.4 |
| NO: 175 | GDS-ppan-MC-MMAF- | NO: 1153 | | | | | | | |
| | LSWLLRLLN-S192 | | | | | | | | |
| SEQ ID | anti-hHER2-HC-G420- | SEQ ID | 67.9 | 78.9 | 67.3 | 78.4 | −0.6 | −0.6 | −1.8 |
| NO: 341 | DS-ppan-MC-MMAF- | NO: 1265 | | | | | | | |
| | LEFIASKLA-N421 | | | | | | | | |
| SEQ ID | anti-hHER2-HC-G236- | SEQ ID | 66.2 | 79.3 | 63.1 | 78.8 | −3.1 | −0.5 | −3.5 |
| NO: 289 | DS-ppan-MC-MMAF- | NO: 1222 | | | | | | | |
| | LEFIASKLA-G237 | | | | | | | | |
| SEQ ID | anti-hHER2-HC-N421- | SEQ ID | 68.9 | t.b. | 68.1 | 77.4 | −0.7 | t.b. | −0.9 |
| NO: 342 | DS-ppan-MC-MMAF- | NO: 1266 | | | | | | | |
| | LEFIASKLA-V422 | | | | | | | | |
| SEQ ID | anti-hHER2-LC-Q155- | SEQ ID | 69.3 | 77.1 | 68.3 | 76.0 | −1.0 | −1.2 | −0.4 |
| NO: 77 | DS-ppan-MC-MMAF- | NO: 1307 | | | | | | | |
| | LEFIASKLA-S156 | | | | | | | | |
| SEQ ID | anti-hHER2-LC-L154- | SEQ ID | 68.9 | 77.2 | 67.6 | 75.9 | −1.2 | −1.3 | −0.9 |
| NO: 45 | GDS-ppan-MC-MMAF- | NO: 1283 | | | | | | | |
| | LSWLLRLLN-Q155 | | | | | | | | |
| SEQ ID | anti-hHER2-HC-R416- | SEQ ID | 63.4 | 78.9 | 66.7 | 78.4 | 3.3 | −0.6 | −6.3 |
| NO: 237 | GDS-ppan-MC-MMAF- | NO: 1193 | | | | | | | |
| | LSWLLRLLN-W417 | | | | | | | | |
| SEQ ID | anti-hHER2-HC-E233- | SEQ ID | 44.9 | 78.5 | 44.0 | 77.7 | −0.9 | −0.8 | −24.8 |
| NO: 187 | GDS-ppan-MC-MMAF- | NO: 1162 | | | | | | | |
| | LSWLLRLLN-L234 | | | | | | | | |
| SEQ ID | anti-hHER2-HC-G138- | SEQ ID | 67.1 | 78.8 | 66.6 | 78.1 | −0.5 | −0.7 | −2.6 |
| NO: 160 | GDS-ppan-MC-MMAF- | NO: 1141 | | | | | | | |
| | LSWLLRLLN-T139 | | | | | | | | |
| SEQ ID | anti-hHER2-HC-G161- | SEQ ID | 68.9 | 78.2 | 67.7 | 75.9 | −1.1 | −2.3 | −0.8 |
| NO: 370 | GDS-ppan-MC-MMAF- | NO: 1321 | | | | | | | |
| | LDMLEWSLM-A162 | | | | | | | | |
| SEQ ID | anti-hHER2-HC-L163- | SEQ ID | 69.0 | 78.4 | 68.3 | 77.5 | −0.8 | −0.9 | −0.7 |
| NO: 372 | GDS-ppan-MC-MMAF- | NO: 1322 | | | | | | | |
| | LDMLEWSLM-T164 | | | | | | | | |
| SEQ ID | anti-hHER2-HC-S165- | SEQ ID | 69.1 | 78.7 | 68.1 | 77.5 | −1.0 | −1.3 | −0.6 |
| NO: 374 | GDS-ppan-MC-MMAF- | NO: 1323 | | | | | | | |
| | LDMLEWSLM-G166 | | | | | | | | |
| SEQ ID | anti-hHER2-HC-S190- | SEQ ID | 68.0 | 78.0 | 66.6 | 76.6 | −1.4 | −1.5 | −1.7 |
| NO: 376 | GDS-ppan-MC-MMAF- | NO: 1324 | | | | | | | |
| | LDMLEWSLM-S191 | | | | | | | | |
| SEQ ID | anti-hHER2-HC-S191- | SEQ ID | 68.0 | 78.1 | 66.5 | 76.2 | −1.5 | −2.0 | −1.7 |
| NO: 377 | GDS-ppan-MC-MMAF- | NO: 1325 | | | | | | | |
| | LDMLEWSLM-S192 | | | | | | | | |
| SEQ ID | anti-hHER2-HC-S192- | SEQ ID | 68.1 | 78.4 | 66.7 | 76.4 | −1.4 | −1.9 | −1.6 |
| NO: 378 | GDS-ppan-MC-MMAF- | NO: 1326 | | | | | | | |
| | LDMLEWSLM-L193 | | | | | | | | |
| SEQ ID | anti-hHER2-HC-G194- | SEQ ID | 68.3 | 78.4 | 66.9 | 76.7 | −1.4 | −1.7 | −1.4 |
| NO: 380 | GDS-ppan-MC-MMAF- | NO: 1327 | | | | | | | |
| | LDMLEWSLM-T195 | | | | | | | | |
| SEQ ID | anti-hHER2-HC-T195- | SEQ ID | 68.3 | 77.9 | 66.9 | 75.8 | −1.4 | −2.1 | −1.4 |
| NO: 381 | GDS-ppan-MC-MMAF- | NO: 1328 | | | | | | | |
| | LDMLEWSLM-Q196 | | | | | | | | |
| SEQ ID | anti-hHER2-LC-T109- | SEQ ID | 66.5 | t.b. | 64.3 | t.b. | −2.2 | t.b. | −3.2 |
| NO: 383 | GDS-ppan-MC-MMAF- | NO: 1329 | | | | | | | |
| | LDMLEWSLM-V110 | | | | | | | | |
| SEQ ID | anti-hHER2-LC-V110- | SEQ ID | 66.1 | t.b. | 63.8 | t.b. | −2.3 | t.b. | −3.6 |
| NO: 384 | GDS-ppan-MC-MMAF- | NO: 1330 | | | | | | | |
| | LDMLEWSLM-A111 | | | | | | | | |

^{a}Name represents part of the HC or LC that contains the peptide tag with the attached compound, the paired wildtype chain is not listed.
^{b}Tm of ADC minus Tm of antibody.
^{c}Tm1 of antibody minus Tm1 of wild-type trastuzumab (69.7° C.).
n.d., Not determined. Measurement was not performed due to insufficient sample amounts.
t.b., Transition too broad for accurate determination of Tm2.

[0899] Purified ADCs were further characterized for in vitro potency against selected cell lines (Table 24) including two engineered cell lines, MDA-MB231 clone 16 and clone 40, and two cell lines (JimT1 and HCC1954) that endogenously express the targeted antigen, human HER2, on the cell surface. MDA-MB231 clone 16 cells stably express 500,000 copies of HER2 per cell while clone 40 expresses only 5000 copies/cell. HCC1954 cells endogenously express high level (500,000 copies/cell) of human HER2 on the surface (Clinchy B, Gazdar A, Rabinovsky R, Yefenof E, Gordon B, Vitetta E S. Breast Cancer Res Treat. (2000) 61:217-228). The JimT1 cell line expresses approximately 80,000 copies of HER2 per cell (Mocanu M-M, Fazekas Z, Petras M, Nagy P, Sebestyen Z, Isola J, Timar J, Park J W, Vereb G, Szollosi J. Cancer Letters (2005) 227: 201-212). The cell proliferation assays were conducted with Cell-Titer-Glo™ (Promega) five days after cells were incubated with various concentrations of ADCs (Riss et al., (2004) Assay Drug Dev Technol. 2:51-62) with an automated system (Melnick et al., (2006) Proc Natl Acad Sci USA. 103:3153-3158). Trastuzumab peptide-tagged-MMAF ADCs specifically killed MDA-MB231 clone 16, HCC1954 and JimT1 cells (Table 24): IC₅₀ values of the trastuzumab peptide-tagged-MMAF ADCs averaged around 0.45 nM, 0.24 nM and 2.0 nM for MDA-MB231 clone 16, HCC1954 and JimT1 cells, respectively (Table 24), consistent with the different HER2 expression levels. No killing of the antigen negative (Her2 low) control cell line MDA-MB231 clone 40 was observed at the highest test concentration (33 nM) for 92 of 97 ADCs.

TABLE 24
In vitro potency of anti-HER2 ADCs. IC₅₀ cell killing concentrations
are reported for HER2 positive and negative cell lines.

| | | | | | MDA-MB- | MDA-MB- |
|---|---|---|---|---|---|---|
| Anti- | | ADC | HCC1954 | JimT1 | 231 clone 16 | 231 clone 40 |
| body | | SEQ ID | IC₅₀ | IC₅₀ | IC₅₀ | IC₅₀ |
| SEQ ID | ADC name^{a} | NO | (μM)^{b} | (μM)^{b} | (μM)^{b} | (μM)^{b} |
| SEQ ID | anti-hHER2-HC-S119- | SEQ ID | 1.94E−04 | 5.10E−04 | 6.82E−04 | >3.33E−02 |
| NO: 151 | GDS-ppan-MC-MMAF- | NO: 1137 | | | | |
| | LSWLLRLLN-T120 | | | | | |
| SEQ ID | anti-hHER2-HC-T120- | SEQ ID | 1.69E−04 | 7.53E−04 | 7.02E−04 | >3.33E−02 |
| NO: 152 | GDS-ppan-MC-MMAF- | NO: 1138 | | | | |
| | LSWLLRLLN-K121 | | | | | |
| SEQ ID | anti-hHER2-HC-T135- | SEQ ID | 1.36E−04 | 2.57E−04 | 3.10E−04 | >3.33E−02 |
| NO: 157 | GDS-ppan-MC-MMAF- | NO: 1139 | | | | |
| | LSWLLRLLN-S136 | | | | | |
| SEQ ID | anti-hHER2-HC-S136- | SEQ ID | 1.64E−04 | 2.43E−04 | 3.05E−04 | >3.33E−02 |
| NO: 158 | GDS-ppan-MC-MMAF- | NO: 1140 | | | | |
| | LSWLLRLLN-G137 | | | | | |
| SEQ ID | anti-hHER2-HC-A162- | SEQ ID | 1.55E−04 | 8.66E−04 | 3.31E−04 | >3.33E−02 |
| NO: 166 | GDS-ppan-MC-MMAF- | NO: 1147 | | | | |
| | LSWLLRLLN-L163 | | | | | |
| SEQ ID | anti-hHER2-HC-T164- | SEQ ID | 1.89E−04 | 5.36E−04 | 4.69E−04 | >3.33E−02 |
| NO: 168 | GDS-ppan-MC-MMAF- | NO: 1148 | | | | |
| | LSWLLRLLN-S165 | | | | | |
| SEQ ID | anti-hHER2-HC-S165- | SEQ ID | 1.69E−04 | 6.19E−04 | 4.00E−04 | >3.33E−02 |
| NO: 169 | GDS-ppan-MC-MMAF- | NO: 1149 | | | | |
| | LSWLLRLLN-G166 | | | | | |
| SEQ ID | anti-hHER2-HC-P189- | SEQ ID | 1.47E−04 | 2.69E−04 | 2.86E−04 | >3.33E−02 |
| NO: 173 | GDS-ppan-MC-MMAF- | NO: 1152 | | | | |
| | LSWLLRLLN-S190 | | | | | |
| SEQ ID | anti-hHER2-HC-G194- | SEQ ID | 1.03E−04 | 1.33E−03 | 3.56E−04 | >3.33E−02 |
| NO: 178 | GDS-ppan-MC-MMAF- | NO: 1156 | | | | |
| | LSWLLRLLN-T195 | | | | | |
| SEQ ID | anti-hHER2-HC-T195- | SEQ ID | 1.42E−04 | 3.00E−04 | 2.79E−04 | >3.33E−02 |
| NO: 179 | GDS-ppan-MC-MMAF- | NO: 1157 | | | | |
| | LSWLLRLLN-Q196 | | | | | |
| SEQ ID | anti-hHER2-HC-P271- | SEQ ID | 1.33E−04 | 4.50E−04 | 6.75E−04 | >3.33E−02 |
| NO: 202 | GDS-ppan-MC-MMAF- | NO: 1172 | | | | |
| | LSWLLRLLN-E272 | | | | | |
| SEQ ID | anti-hHER2-HC-A330- | SEQ ID | 9.68E−05 | 3.18E−04 | 4.66E−04 | >3.33E−02 |
| NO: 218 | GDS-ppan-MC-MMAF- | NO: 1181 | | | | |
| | LSWLLRLLN-P331 | | | | | |
| SEQ ID | anti-hHER2-HC-K340- | SEQ ID | 3.76E−04 | 5.55E−04 | 3.08E−04 | >3.33E−02 |
| NO: 220 | GDS-ppan-MC-MMAF- | NO: 1182 | | | | |
| | LSWLLRLLN-G341 | | | | | |
| SEQ ID | anti-hHER2-HC-G341- | SEQ ID | 7.21E−05 | 3.58E−04 | 7.82E−04 | >3.33E−02 |
| NO: 221 | GDS-ppan-MC-MMAF- | NO: 1183 | | | | |
| | LSWLLRLLN-Q342 | | | | | |
| SEQ ID | anti-hHER2-HC-R344- | SEQ ID | 2.13E−03 | 4.47E−04 | 3.21E−04 | >3.33E−02 |
| NO: 224 | GDS-ppan-MC-MMAF- | NO: 1186 | | | | |
| | LSWLLRLLN-E345 | | | | | |
| SEQ ID | anti-hHER2-HC-K360- | SEQ ID | 1.80E−04 | 1.31E−03 | 7.57E−04 | >3.33E−02 |
| NO: 229 | GDS-ppan-MC-MMAF- | NO: 1187 | | | | |
| | LSWLLRLLN-N361 | | | | | |
| SEQ ID | anti-hHER2-HC-E388- | SEQ ID | 1.57E−04 | 4.21E−04 | 5.42E−04 | >3.33E−02 |
| NO: 127 | GDS-ppan-MC-MMAF- | NO: 1118 | | | | |
| | LSWLLRLLN-N389 | | | | | |
| SEQ ID | anti-hHER2-HC-Q418- | SEQ ID | 2.48E−04 | 1.24E−03 | 7.31E−04 | >3.33E−02 |
| NO: 239 | GDS-ppan-MC-MMAF- | NO: 1195 | | | | |
| | LSWLLRLLN-Q419 | | | | | |
| SEQ ID | anti-hHER2-HC-N434- | SEQ ID | n.d. | n.d. | n.d. | n.d. |
| NO: 244 | GDS-ppan-MC-MMAF- | NO: 1197 | | | | |
| | LSWLLRLLN-H435 | | | | | |
| SEQ ID | anti-hHER2-HC-P445- | SEQ ID | 7.42E−05 | 3.84E−03 | 7.44E−04 | >3.33E−02 |
| NO: 248 | GDS-ppan-MC-MMAF- | NO: 1199 | | | | |
| | LSWLLRLLN-G446 | | | | | |
| SEQ ID | anti-hHER2-HC-S119- | SEQ ID | 1.80E−04 | 3.46E−04 | 3.21E−04 | >3.33E−02 |
| NO: 250 | DS-ppan-MC-MMAF- | NO: 1201 | | | | |
| | LEFIASKLA-T120 | | | | | |
| SEQ ID | anti-hHER2-HC-T120- | SEQ ID | 1.98E−04 | 4.59E−04 | 3.94E−04 | >3.33E−02 |
| NO: 251 | DS-ppan-MC-MMAF- | NO: 1202 | | | | |
| | LEFIASKLA-K121 | | | | | |
| SEQ ID | anti-hHER2-HC-S136- | SEQ ID | 6.48E−05 | 3.95E−04 | 2.62E−04 | >3.33E−02 |
| NO: 257 | DS-ppan-MC-MMAF- | NO: 1203 | | | | |
| | LEFIASKLA-137 | | | | | |
| SEQ ID | anti-hHER2-HC-G138- | SEQ ID | 1.58E−04 | >3.33E−02 | 3.21E−04 | >3.33E−02 |
| NO: 259 | DS-ppan-MC-MMAF- | NO: 1204 | | | | |
| | LEFIASKLA-T139 | | | | | |
| SEQ ID | anti-hHER2-HC-S165- | SEQ ID | 1.65E−04 | 4.07E−04 | 3.79E−04 | >3.33E−02 |
| NO: 268 | DS-ppan-MC-MMAF- | NO: 1209 | | | | |
| | LEFIASKLA-G166 | | | | | |
| SEQ ID | anti-hHER2-HC-G194- | SEQ ID | 1.22E−04 | 6.48E−04 | 1.83E−04 | >3.33E−02 |
| NO: 277 | DS-ppan-MC-MMAF- | NO: 1215 | | | | |
| | LEFIASKLA-T195 | | | | | |
| SEQ ID | anti-hHER2-HC-L328- | SEQ ID | 1.37E−04 | 2.79E−04 | 1.15E−03 | >3.33E−02 |
| NO: 315 | DS-ppan-MC-MMAF- | NO: 1243 | | | | |
| | LEFIASKLA-P329 | | | | | |
| SEQ ID | anti-hHER2-HC-A330- | SEQ ID | 4.09E−04 | 2.24E−02 | 2.85E−04 | >3.33E−02 |
| NO: 317 | DS-ppan-MC-MMAF- | NO: 1245 | | | | |
| | LEFIASKLA-P331 | | | | | |
| SEQ ID | anti-hHER2-HC-E388- | SEQ ID | 2.26E−04 | 1.83E−03 | 3.12E−04 | >3.33E−02 |
| NO: 129 | DS-ppan-MC-MMAF- | NO: 1122 | | | | |
| | LEFIASKLA-N389 | | | | | |
| SEQ ID | anti-hHER2-HC-G446- | SEQ ID | 2.12E−04 | 6.82E−04 | 7.77E−04 | >3.33E−02 |
| NO: 349 | DS-ppan-MC-MMAF- | NO: 1270 | | | | |
| | LEFIASKLA-K447 | | | | | |
| SEQ ID | anti-hHER2-LC-V110- | SEQ ID | 2.31E−04 | 4.14E−04 | 5.18E−04 | >3.33E−02 |
| NO: 32 | GDS-ppan-MC-MMAF- | NO: 1272 | | | | |
| | LSWLLRLLN-A111 | | | | | |
| SEQ ID | anti-hHER2-LC-A111- | SEQ ID | 1.95E−04 | 1.15E−02 | 5.05E−04 | >3.33E−02 |
| NO: 33 | GDS-ppan-MC-MMAF- | NO: 1273 | | | | |
| | LSWLLRLLN-A112 | | | | | |
| SEQ ID | anti-hHER2-LC-Q155- | SEQ ID | 1.43E−04 | 5.47E−04 | 3.70E−04 | >3.33E−02 |
| NO: 46 | GDS-ppan-MC-MMAF- | NO: 1284 | | | | |
| | LSWLLRLLN-S156 | | | | | |
| SEQ ID | anti-hHER2-LC-S162- | SEQ ID | 2.67E−04 | 8.13E−04 | 7.14E−04 | >3.33E−02 |
| NO: 48 | GDS-ppan-MC-MMAF- | NO: 1251 | | | | |
| | LSWLLRLLN-V163 | | | | | |
| SEQ ID | anti-hHER2-LC-Q199- | SEQ ID | 1.92E−04 | 9.21E−04 | 4.77E−04 | >3.33E−02 |
| NO: 56 | GDS-ppan-MC-MMAF- | NO: 1292 | | | | |
| | LSWLLRLLN-G200 | | | | | |
| SEQ ID | anti-hHER2-LC-V110- | SEQ ID | 3.97E−04 | 4.62E−04 | 2.77E−04 | >3.33E−02 |
| NO: 63 | DS-ppan-MC-MMAF- | NO: 1294 | | | | |
| | LEFIASKLA-A111 | | | | | |
| SEQ ID | anti-hHER2-LC-A111- | SEQ ID | 1.59E−04 | 6.32E−04 | 1.68E−02 | >3.33E−02 |
| NO: 64 | DS-ppan-MC-MMAF- | NO: 1295 | | | | |
| | LEFIASKLA-A112 | | | | | |
| SEQ ID | anti-hHER2-LC-A153- | SEQ ID | 1.80E−04 | 2.03E−02 | 2.60E−04 | >3.33E−02 |
| NO: 75 | DS-ppan-MC-MMAF- | NO: 1305 | | | | |
| | LEFIASKLA-L154 | | | | | |
| SEQ ID | anti-hHER2-LC-L201- | SEQ ID | 4.25E−04 | 3.86E−04 | 4.74E−04 | >3.33E−02 |
| NO: 89 | DS-ppan-MC-MMAF- | NO: 1316 | | | | |
| | LEFIASKLA-S202 | | | | | |
| SEQ ID | anti-hHER2-HC-N389- | SEQ ID | 2.32E−04 | 4.93E−04 | 2.26E−04 | >3.33E−02 |
| NO: 330 | DS-ppan-MC-MMAF- | NO: 1256 | | | | |
| | LEFIASKLA-N390 | | | | | |
| SEQ ID | anti-hHER2-HC-R255- | SEQ ID | 2.06E−04 | 3.67E−04 | 1.16E−04 | >3.33E−02 |
| NO: 195 | GDS-ppan-MC-MMAF- | NO: 1167 | | | | |
| | LSWLLRLLN-T256 | | | | | |
| SEQ ID | anti-hHER2-HC-P291- | SEQ ID | 1.99E−04 | 3.04E−04 | 9.74E−05 | >3.33E−02 |
| NO: 206 | GDS-ppan-MC-MMAF- | NO: 1173 | | | | |
| | LSWLLRLLN-R292 | | | | | |
| SEQ ID | anti-hHER2-HC-L235- | SEQ ID | 1.90E−04 | 2.97E−04 | 6.48E−05 | >3.33E−02 |
| NO: 288 | DS-ppan-MC-MMAF- | NO: 1221 | | | | |
| | LEFIASKLA-G236 | | | | | |
| SEQ ID | anti-hHER2-HC-A118- | SEQ ID | 2.41E−04 | 3.39E−04 | 1.97E−04 | >3.33E−02 |
| NO: 249 | DS-ppan-MC-MMAF- | NO: 1200 | | | | |
| | LEFIASKLA-S119 | | | | | |
| SEQ ID | anti-hHER2-HC-R344- | SEQ ID | 2.31E−04 | 3.39E−04 | 6.45E−05 | >3.33E−02 |
| NO: 323 | DS-ppan-MC-MMAF- | NO: 1251 | | | | |
| | LEFIASKLA-E345 | | | | | |
| SEQ ID | anti-hHER2-HC-P343- | SEQ ID | 2.40E−04 | 3.75E−04 | 7.55E−05 | >3.33E−02 |
| NO: 322 | DS-ppan-MC-MMAF- | NO: 1250 | | | | |
| | LEFIASKLA-R344 | | | | | |
| SEQ ID | anti-hHER2-HC-P271- | SEQ ID | 2.21E−04 | 3.78E−04 | 7.46E−05 | >3.33E−02 |
| NO: 301 | DS-ppan-MC-MMAF- | NO: 1233 | | | | |
| | LEFIASKLA-E272 | | | | | |
| SEQ ID | anti-hHER2-HC-Q196- | SEQ ID | 2.44E−04 | 4.28E−04 | 1.13E−04 | >3.33E−02 |
| NO: 279 | DS-ppan-MC-MMAF- | NO: 1217 | | | | |
| | LEFIASKLA-T197 | | | | | |
| SEQ ID | anti-hHER2-HC-S254- | SEQ ID | 1.92E−04 | 5.49E−04 | 6.43E−05 | >3.33E−02 |
| NO: 293 | DS-ppan-MC-MMAF- | NO: 1226 | | | | |
| | LEFIASKLA-R255 | | | | | |
| SEQ ID | anti-hHER2-HC-S254- | SEQ ID | n.d. | n.d. | n.d. | n.d. |
| NO: 194 | GDS-ppan-MC-MMAF- | NO: 1166 | | | | |
| | LSWLLRLLN-R255 | | | | | |
| SEQ ID | anti-hHER2-HC-R416- | SEQ ID | 2.69E−04 | 7.57E−04 | 8.06E−05 | >3.33E−02 |
| NO: 337 | DS-ppan-MC-MMAF- | NO: 1261 | | | | |
| | LEFIASKLA-W417 | | | | | |
| SEQ ID | anti-hHER2-HC-D270- | SEQ ID | 2.28E−04 | 3.41E−04 | 8.89E−05 | >3.33E−02 |
| NO: 201 | GDS-ppan-MC-MMAF- | NO: 1171 | | | | |
| | LSWLLRLLN-P271 | | | | | |
| SEQ ID | anti-hHER2-HC-A162- | SEQ ID | 2.27E−04 | 3.42E−04 | 1.24E−04 | >3.33E−02 |
| NO: 265 | DS-ppan-MC-MMAF- | NO: 1207 | | | | |
| | LEFIASKLA-L163 | | | | | |
| SEQ ID | anti-hHER2-HC-S191- | SEQ ID | 2.39E−04 | 3.21E−04 | 1.49E−04 | >3.33E−02 |
| NO: 274 | DS-ppan-MC-MMAF- | NO: 1213 | | | | |
| | LEFIASKLA-S192 | | | | | |
| SEQ ID | anti-hHER2-HC-S192- | SEQ ID | 2.30E−04 | 3.37E−04 | 1.47E−04 | >3.33E−02 |
| NO: 275 | DS-ppan-MC-MMAF- | NO: 1214 | | | | |
| | LEFIASKLA-L193 | | | | | |
| SEQ ID | anti-hHER2-HC-L193- | SEQ ID | 2.10E−04 | 3.03E−04 | 7.99E−05 | >3.33E−02 |
| NO: 177 | GDS-ppan-MC-MMAF- | NO: 1155 | | | | |
| | LSWLLRLLN-G194 | | | | | |
| SEQ ID | anti-hHER2-HC-R255- | SEQ ID | 2.06E−04 | 4.33E−04 | 4.40E−05 | >3.33E−02 |
| NO: 294 | DS-ppan-MC-MMAF- | NO: 1227 | | | | |
| | LEFIASKLA-T256 | | | | | |
| SEQ ID | anti-hHER2-HC-H268- | SEQ ID | 2.26E−04 | 3.79E−04 | 8.97E−05 | >3.33E−02 |
| NO: 199 | GDS-ppan-MC-MMAF- | NO: 1169 | | | | |
| | LSWLLRLLN-E269 | | | | | |
| SEQ ID | anti-hHER2-HC-S267- | SEQ ID | 2.30E−04 | 3.68E−04 | 8.13E−05 | >3.33E−02 |
| NO: 198 | GDS-ppan-MC-MMAF- | NO: 1168 | | | | |
| | LSWLLRLLN-H268 | | | | | |
| SEQ ID | anti-hHER2-HC-L235- | SEQ ID | 2.43E−04 | 3.09E−04 | 1.44E−04 | >3.33E−02 |
| NO: 189 | GDS-ppan-MC-MMAF- | NO: 1163 | | | | |
| | LSWLLRLLN-G236 | | | | | |
| SEQ ID | anti-hHER2-HC-P343- | SEQ ID | 2.27E−04 | 3.88E−04 | 6.27E−05 | >3.33E−02 |
| NO: 223 | GDS-ppan-MC-MMAF- | NO: 1185 | | | | |
| | LSWLLRLLN-R344 | | | | | |
| SEQ ID | anti-hHER2-HC-I253- | SEQ ID | n.d. | n.d. | n.d. | n.d. |
| NO: 193 | GDS-ppan-MC-MMAF- | NO: 1165 | | | | |
| | LSWLLRLLN-S254 | | | | | |
| SEQ ID | anti-hHER2-HC-P206- | SEQ ID | 2.68E−04 | 9.11E−04 | 1.79E−04 | >3.33E−02 |
| NO: 182 | GDS-ppan-MC-MMAF- | NO: 1160 | | | | |
| | LSWLLRLLN-S207 | | | | | |
| SEQ ID | anti-hHER2-HC-P257- | SEQ ID | 2.20E−04 | 5.53E−04 | 7.67E−05 | >3.33E−02 |
| NO: 296 | DS-ppan-MC-MMAF- | NO: 1228 | | | | |
| | LEFIASKLA-E258 | | | | | |
| SEQ ID | anti-hHER2-HC-T195- | SEQ ID | 1.91E−04 | 3.14E−04 | 1.31E−04 | 2.90E−02 |
| NO: 278 | DS-ppan-MC-MMAF- | NO: 1216 | | | | |
| | LEFIASKLA-Q196 | | | | | |
| SEQ ID | anti-hHER2-HC-E269- | SEQ ID | 2.33E−04 | 3.97E−04 | 1.13E−04 | >3.33E−02 |
| NO: 299 | DS-ppan-MC-MMAF- | NO: 1231 | | | | |
| | LEFIASKLA-D270 | | | | | |
| SEQ ID | anti-hHER2-HC-A118- | SEQ ID | 2.57E−04 | 6.74E−04 | 1.95E−04 | >3.33E−02 |
| NO: 150 | GDS-ppan-MC-MMAF- | NO: 1136 | | | | |
| | LSWLLRLLN-S119 | | | | | |
| SEQ ID | anti-hHER2-HC-A231- | SEQ ID | 2.32E−04 | 2.70E−04 | 1.72E−04 | >3.33E−02 |
| NO: 185 | GDS-ppan-MC-MMAF- | NO: 1161 | | | | |
| | LSWLLRLLN-P232 | | | | | |
| SEQ ID | anti-hHER2-LC-E161- | SEQ ID | 1.63E−04 | 2.74E−04 | 1.39E−04 | >3.33E−02 |
| NO: 47 | GDS-ppan-MC-MMAF- | NO: 1285 | | | | |
| | LSWLLRLLN-S162 | | | | | |
| SEQ ID | anti-hHER2-LC-S203- | SEQ ID | 2.20E−04 | 3.33E−04 | 1.84E−04 | >3.33E−02 |
| NO: 91 | DS-ppan-MC-MMAF- | NO: 1317 | | | | |
| | LEFIASKLA-P204 | | | | | |
| SEQ ID | anti-hHER2-LC-S203- | SEQ ID | 2.32E−04 | 4.29E−04 | 1.28E−04 | >3.33E−02 |
| NO: 60 | GDS-ppan-MC-MMAF- | NO: 1318 | | | | |
| | LSWLLRLLN-P204 | | | | | |
| SEQ ID | anti-hHER2-LC-K207- | SEQ ID | 2.23E−04 | 4.54E−04 | 1.78E−04 | 1.49E−02 |
| NO: 61 | GDS-ppan-MC-MMAF- | NO: 1319 | | | | |
| | LSWLLRLLN-S208 | | | | | |
| SEQ ID | anti-hHER2-LC-S202- | SEQ ID | 2.41E−04 | 4.33E−04 | 1.82E−04 | >3.33E−02 |
| NO: 90 | DS-ppan-MC-MMAF- | NO: 1320 | | | | |
| | LEFIASKLA-S203 | | | | | |
| SEQ ID | anti-hHER2-LC-A153- | SEQ ID | 2.44E−04 | 3.95E−04 | 1.42E−04 | >3.33E−02 |
| NO: 44 | GDS-ppan-MC-MMAF- | NO: 1282 | | | | |
| | LSWLLRLLN-L154 | | | | | |
| SEQ ID | anti-hHER2-HC-T164- | SEQ ID | 1.64E−04 | 3.00E−04 | 1.22E−04 | >3.33E−02 |
| NO: 267 | DS-ppan-MC-MMAF- | NO: 1208 | | | | |
| | LEFIASKLA-S165 | | | | | |
| SEQ ID | anti-hHER2-HC-S192- | SEQ ID | 2.53E−04 | 3.41E−04 | 1.81E−04 | 3.25E−02 |
| NO: 176 | GDS-ppan-MC-MMAF- | NO: 1154 | | | | |
| | LSWLLRLLN-L193 | | | | | |
| SEQ ID | anti-hHER2-HC-D270- | SEQ ID | 2.47E−04 | 4.49E−04 | 1.87E−04 | >3.33E−02 |
| NO: 300 | DS-ppan-MC-MMAF- | NO: 1232 | | | | |
| | LEFIASKLA-P271 | | | | | |
| SEQ ID | anti-hHER2-HC-Q196- | SEQ ID | 2.49E−04 | 2.69E−04 | 1.81E−04 | 2.26E−02 |
| NO: 180 | GDS-ppan-MC-MMAF- | NO: 1158 | | | | |
| | LSWLLRLLN-T197 | | | | | |
| SEQ ID | anti-hHER2-HC-S191- | SEQ ID | 2.35E−04 | 3.10E−04 | 1.81E−04 | >3.33E−02 |
| NO: 175 | GDS-ppan-MC-MMAF- | NO: 1153 | | | | |
| | LSWLLRLLN-S192 | | | | | |
| SEQ ID | anti-hHER2-HC-G420- | SEQ ID | 2.47E−04 | 7.03E−04 | 1.56E−04 | >3.33E−02 |
| NO: 341 | DS-ppan-MC-MMAF- | NO: 1265 | | | | |
| | LEFIASKLA-N421 | | | | | |
| SEQ ID | anti-hHER2-HC-G236- | SEQ ID | 2.37E−04 | 1.75E−03 | 1.30E−04 | >3.33E−02 |
| NO: 289 | DS-ppan-MC-MMAF- | NO: 1222 | | | | |
| | LEFIASKLA-G237 | | | | | |
| SEQ ID | anti-hHER2-HC-N421- | SEQ ID | 2.47E−04 | 2.27E−02 | 1.59E−04 | >3.33E−02 |
| NO: 342 | DS-ppan-MC-MMAF- | NO: 1266 | | | | |
| | LEFIASKLA-V422 | | | | | |
| SEQ ID | anti-hHER2-LC-Q155- | SEQ ID | 2.21E−04 | 4.48E−04 | 1.70E−04 | >3.33E−02 |
| NO: 77 | DS-ppan-MC-MMAF- | NO: 1307 | | | | |
| | LEFIASKLA-S156 | | | | | |
| SEQ ID | anti-hHER2-LC-L154- | SEQ ID | 2.48E−04 | 4.57E−04 | 1.26E−04 | >3.33E−02 |
| NO: 45 | GDS-ppan-MC-MMAF- | NO: 1283 | | | | |
| | LSWLLRLLN-Q155 | | | | | |
| SEQ ID | anti-hHER2-HC-R416- | SEQ ID | 6.68E−04 | 8.65E−04 | 2.69E−04 | 3.03E−02 |
| NO: 237 | GDS-ppan-MC-MMAF- | NO: 1193 | | | | |
| | LSWLLRLLN-W417 | | | | | |
| SEQ ID | anti-hHER2-HC-E233- | SEQ ID | 2.43E−04 | 4.47E−04 | 1.01E−04 | >3.33E−02 |
| NO: 187 | GDS-ppan-MC-MMAF- | NO: 1162 | | | | |
| | LSWLLRLLN-L234 | | | | | |
| SEQ ID | anti-hHER2-HC-G138- | SEQ ID | 2.44E−04 | 3.16E−04 | 1.78E−04 | >3.33E−02 |
| NO: 160 | GDS-ppan-MC-MMAF- | NO: 1141 | | | | |
| | LSWLLRLLN-T139 | | | | | |
| SEQ ID | anti-hHER2-HC-G161- | SEQ ID | 2.28E−04 | 3.48E−04 | 1.63E−04 | >3.33E−02 |
| NO: 370 | GDS-ppan-MC-MMAF- | NO: 1321 | | | | |
| | LDMLEWSLM-A162 | | | | | |
| SEQ ID | anti-hHER2-HC-L163- | SEQ ID | 2.72E−04 | >3.33E−02 | 2.21E−04 | >3.33E−02 |
| NO: 372 | GDS-ppan-MC-MMAF- | NO: 1322 | | | | |
| | LDMLEWSLM-T164 | | | | | |
| SEQ ID | anti-hHER2-HC-S165- | SEQ ID | 2.54E−04 | 4.88E−04 | 1.95E−04 | >3.33E−02 |
| NO: 374 | GDS-ppan-MC-MMAF- | NO: 1323 | | | | |
| | LDMLEWSLM-G166 | | | | | |
| SEQ ID | anti-hHER2-HC-S190- | SEQ ID | 2.58E−04 | 7.20E−04 | 1.69E−04 | >3.33E−02 |
| NO: 376 | GDS-ppan-MC-MMAF- | NO: 1324 | | | | |
| | LDMLEWSLM-S191 | | | | | |
| SEQ ID | anti-hHER2-HC-S191- | SEQ ID | 2.45E−04 | 3.68E−04 | 1.84E−04 | >3.33E−02 |
| NO: 377 | GDS-ppan-MC-MMAF- | NO: 1325 | | | | |
| | LDMLEWSLM-S192 | | | | | |
| SEQ ID | anti-hHER2-HC-S192- | SEQ ID | 2.58E−04 | 4.76E−04 | 1.57E−04 | >3.33E−02 |
| NO: 378 | GDS-ppan-MC-MMAF- | NO: 1326 | | | | |
| | LDMLEWSLM-L193 | | | | | |
| SEQ ID | anti-hHER2-HC-G194- | SEQ ID | 2.51E−04 | 4.93E−04 | 1.67E−04 | >3.33E−02 |
| NO: 380 | GDS-ppan-MC-MMAF- | NO: 1327 | | | | |
| | LDMLEWSLM-T195 | | | | | |
| SEQ ID | anti-hHER2-HC-T195- | SEQ ID | 2.44E−04 | 4.39E−04 | 1.36E−04 | >3.33E−02 |
| NO: 381 | GDS-ppan-MC-MMAF- | NO: 1328 | | | | |
| | LDMLEWSLM-Q196 | | | | | |
| SEQ ID | anti-hHER2-LC-T109- | SEQ ID | 2.12E−04 | 3.19E−04 | 1.26E−04 | >3.33E−02 |
| NO: 383 | GDS-ppan-MC-MMAF- | NO: 1329 | | | | |
| | LDMLEWSLM-V110 | | | | | |
| SEQ ID | anti-hHER2-LC-V110- | SEQ ID | 2.24E−04 | 3.54E−04 | 1.60E−04 | >3.33E−02 |
| NO: 384 | GDS-ppan-MC-MMAF- | NO: 1330 | | | | |
| | LDMLEWSLM-A111 | | | | | |

^{a}Name represents part of the HC or LC that contains the peptide tag with the attached compound, the paired wildtype chain is not listed.
^{b}33 nM was the highest concentration used in the IC₅₀ cell killing assay.
n.d., not determined.

[0900] Good pharmacokinetic properties are essential for in vivo efficacy of ADCs (Hamblett, et al., Clin Cancer Res., 10:7063-7070 (2004); Alley et al., Bioconjug. Chem. 19:759-765 (2008)). The conjugation of a CoA-MC-MMAF molecule to an antibody can negatively affect its biophysical properties resulting in rapid clearance and dramatically reduced in vivo efficacy of the corresponding ADC (Hamblett et al., 2004). To evaluate the effects of conjugation site on in vivo clearance and ADC in vivo stability, pharmacokinetic (PK) studies were performed in non-tumor bearing mice with 86 peptide-tagged trastuzumab ADCs (Table 25).

[0901] Each peptide-tagged MMAF ADC was injected intravenously into three mice at a single dose of 1 mg/kg. Nine plasma samples were then collected over a time course of 340 hours before plasma titers of the ADCs were determined by ELISA. The ELISA assay uses the immobilized extracellular domain of human HER2 for capturing trastuzumab ADC molecules from plasma samples. Following the capture step of this assay, an anti-MMAF antibody is used to exclusively measure the plasma concentration of the “intact” trastuzumab MMAF conjugate. In a second ELISA experiment, an anti-hIgG antibody generates a signal indicating the plasma concentration of both conjugated and unconjugated trastuzumab molecules. If no payload deconjugation of the ADC occurs in vivo, both anti-MMAF and anti-hIgG ELISAs are expected to provide identical readouts on ADC plasma concentration. However, in the case of payload loss in vivo, the anti-MMAF ELISA is expected to produce a lower signal than the anti-hIgG ELISA. The comparison of both ELISA signals therefore allows the quantification of payload deconjugation during the in vivo exposure of the respective ADC. The interpretation of the PK data is based on standard curves that were generated with the same ADCs as used for intravenous injection into mice.

[0902] The area-under-the-plasma-concentration-versus-time-curve (AUC) is an important pharmacokinetic parameter that can be used to determine the total clearance and bioavailability of the administered biotherapeutic agent. For each peptide-tagged MMAF ADC, two characteristic AUC values, AUC hIgG and AUC MMAF, were obtained by the anti-hIgG and anti-MMAF ELISA experiments, respectively. Table 25 summarizes the AUC hIgG and AUC MMAF values as well as their respective ratios of the 86 tested peptide-tagged ADCs. The obtained AUC hIgG values span over a wide range with the highest value of 32553 nM*hr being about 30-fold higher than the lowest value of 1362 nM*hr, with the average being 16935 nM*hr. FIG. 20 A-C exemplifies PK curves of three peptide-tagged MMAF ADCs displaying high AUC hIgG values (ADC of SEQ ID NO:248, 28334 nM*hr; ADC of SEQ ID NO:33, 21011 nM*hr; ADC of SEQ ID NO:251, 21689 nM*hr). On the contrary, PK curves of three constructs showing low AUC hIgG values (ADC of SEQ ID NO:218, 1362 nM*hr; ADC of SEQ ID NO:202, 1757 nM*hr; ADC of SEQ ID NO:244, 2378 nM*hr) are illustrated in FIG. 20 D-F. Despite the great variation of AUC hIgG values, both anti-hIgG and anti-MMAF titers track each other, suggesting that little if any payload deconjugation occurred in vivo. Moreover, the ratios between AUC MMAF and AUC hIgG values of all 86 tested peptide-tagged ADCs average at 1.0±0.1 (AUC(MMAF)/AUC(hIgG)±Standard Deviation, see Table 25 and FIG. 21) suggesting that the maleimide-based linkage between the MC-MMAF and the terminal thiol of the 4′-phosphopantetheine (ppan) moiety remained stable in circulation over the time course of the PK experiment. Likewise, these results also indicate a high in vivo stability of the phosphodiester-based linkage between the ppan prosthetic group and the serine residue of the inserted S6/ybbR/A1 peptide tag.

[0903] The rapid clearance observed for some of the peptide-tagged ADCs is likely the result of inserting an S6, A1 or ybbR peptide sequence into specific regions of the IgG1 molecule rather than drug attachment. The putative relationship between tag insertion site and pharmacokinetic profile is exemplified by the two peptide-tagged MMAF ADCs of SEQ ID NO:218 and SEQ ID NO:202, which display the lowest and third lowest measured AUC hIgG values of 1362 nM*hr and 1757 nM*hr, respectively. Both ADCs contain S6 tag insertions in the CH2 domain of the heavy chain. In addition to the instability in murine circulation, these ADCs also exhibit the fifth lowest and ninth lowest thermostabilities of the 86 tested samples of the PK study. According to DSF measurements, the corresponding ADCs display Tm1s of 49.0° C. (ADC of SEQ ID NO:218) and 51.2° C. (ADC of SEQ ID NO:202), resulting in a decrease of 20.7° C. and 18.5° C., respectively, in comparison to wild-type trastuzumab having a Tm1 of 69.7° C. In contrast, the forty ADCs with the highest AUC hIgG values (19695-32553 nM*hr) display an average Tm1 value of 67.4° C., which is only 2.3° C. below the Tm1 of wild-type trastuzumab, suggesting a possible correlation between pharmacokinetics and thermostability of ADCs. Moreover, 26 of these forty ADCs contain S6, ybbR or A1 tags in loop regions of the CH1 domain of the heavy chain. As mentioned above, peptide tag insertions at these favorable sites also display the best overall conjugation efficiencies, making them preferred candidates for ADC production. These include antibodies with heavy chain insertions between S119-T120, T120-K121, T135-S136, S136-G137, G138-T139, A162-L₁₆₃, T164-S165, S165-G166, G194-T195, T195-Q196, and E388-N389 (CH3 domain) corresponding to SEQ ID numbers 126, 127, 129, 130, 131, 132, 149, 151, 152, 157, 158, 160, 166, 168, 169, 178, 179, 250, 251, 256, 257, 259, 265, 267, 268, 277, 278, 356, 358, 359, 364, 365, 367, 371, 373, 374, 380, and 381.

TABLE 25
Pharmacokinetics data.

| Anti- | | ADC | | | |
|---|---|---|---|---|---|
| body | | SEQ ID | AUC^{b} hIgG | AUC^{c} MMAF | AUC(MMAF)/ |
| SEQ ID | ADC name^{a} | NO | (nM * hr) | (nM * hr) | AUC(hIgG) |
| SEQ ID | anti-hHER2-HC-S119- | SEQ ID | 22485 | 21693 | 1.0 |
| NO: 151 | GDS-ppan-MC-MMAF- | NO: | | | |
| | LSWLLRLLN-T120 | 1137 | | | |
| SEQ ID | anti-hHER2-HC-T120- | SEQ ID | 13880 | 12542 | 0.9 |
| NO: 152 | GDS-ppan-MC-MMAF- | NO: | | | |
| | LSWLLRLLN-K121 | 1138 | | | |
| SEQ ID | anti-hHER2-HC-T135- | SEQ ID | 21494 | 16931 | 0.8 |
| NO: 157 | GDS-ppan-MC-MMAF- | NO: | | | |
| | LSWLLRLLN-S136 | 1139 | | | |
| SEQ ID | anti-hHER2-HC-S136- | SEQ ID | 22833 | 23533 | 1.0 |
| NO: 158 | GDS-ppan-MC-MMAF- | NO: | | | |
| | LSWLLRLLN-G137 | 1140 | | | |
| SEQ ID | anti-hHER2-HC-A162- | SEQ ID | 11178 | 10981 | 1.0 |
| NO: 166 | GDS-ppan-MC-MMAF- | NO: | | | |
| | LSWLLRLLN-L163 | 1147 | | | |
| SEQ ID | anti-hHER2-HC-T164- | SEQ ID | 20916 | 22125 | 1.1 |
| NO: 168 | GDS-ppan-MC-MMAF- | NO: | | | |
| | LSWLLRLLN-S165 | 1148 | | | |
| SEQ ID | anti-hHER2-HC-S165- | SEQ ID | 23242 | 21304 | 0.9 |
| NO: 169 | GDS-ppan-MC-MMAF- | NO: | | | |
| | LSWLLRLLN-G166 | 1149 | | | |
| SEQ ID | anti-hHER2-HC-P189- | SEQ ID | 8922 | 8840 | 1.0 |
| NO: 173 | GDS-ppan-MC-MMAF- | NO: | | | |
| | LSWLLRLLN-S190 | 1152 | | | |
| SEQ ID | anti-hHER2-HC-G194- | SEQ ID | 20702 | 18593 | 0.9 |
| NO: 178 | GDS-ppan-MC-MMAF- | NO: | | | |
| | LSWLLRLLN-T195 | 1156 | | | |
| SEQ ID | anti-hHER2-HC-T195- | SEQ ID | 16083 | 17465 | 1.1 |
| NO: 179 | GDS-ppan-MC-MMAF- | NO: | | | |
| | LSWLLRLLN-Q196 | 1157 | | | |
| SEQ ID | anti-hHER2-HC-P271- | SEQ ID | 1757 | 1550 | 0.9 |
| NO: 202 | GDS-ppan-MC-MMAF- | NO: | | | |
| | LSWLLRLLN-E272 | 1172 | | | |
| SEQ ID | anti-hHER2-HC-A330- | SEQ ID | 1362 | 1768 | 1.3 |
| NO: 218 | GDS-ppan-MC-MMAF- | NO: | | | |
| | LSWLLRLLN-P331 | 1181 | | | |
| SEQ ID | anti-hHER2-HC-K340- | SEQ ID | 17396 | 16060 | 0.9 |
| NO: 220 | GDS-ppan-MC-MMAF- | NO: | | | |
| | LSWLLRLLN-G341 | 1182 | | | |
| SEQ ID | anti-hHER2-HC-G341- | SEQ ID | 9214 | 10336 | 1.1 |
| NO: 221 | GDS-ppan-MC-MMAF- | NO: | | | |
| | LSWLLRLLN-Q342 | 1183 | | | |
| SEQ ID | anti-hHER2-HC-R344- | SEQ ID | 15196 | 16061 | 1.1 |
| NO: 224 | GDS-ppan-MC-MMAF- | NO: | | | |
| | LSWLLRLLN-E345 | 1186 | | | |
| SEQ ID | anti-hHER2-HC-K360- | SEQ ID | 7867 | 8209 | 1.0 |
| NO: 229 | GDS-ppan-MC-MMAF- | NO: | | | |
| | LSWLLRLLN-N361 | 1187 | | | |
| SEQ ID | anti-hHER2-HC-E388- | SEQ ID | 14224 | 14887 | 1.0 |
| NO: 127 | GDS-ppan-MC-MMAF- | NO: | | | |
| | LSWLLRLLN-N389 | 1118 | | | |
| SEQ ID | anti-hHER2-HC-Q418- | SEQ ID | 8561 | 6136 | 0.7 |
| NO: 239 | GDS-ppan-MC-MMAF- | NO: | | | |
| | LSWLLRLLN-Q419 | 1195 | | | |
| SEQ ID | anti-hHER2-HC-N434- | SEQ ID | 2378 | 2249 | 0.9 |
| NO: 244 | GDS-ppan-MC-MMAF- | NO: | | | |
| | LSWLLRLLN-H435 | 1197 | | | |
| SEQ ID | anti-hHER2-HC-P445- | SEQ ID | 28334 | 24130 | 0.9 |
| NO: 248 | GDS-ppan-MC-MMAF- | NO: | | | |
| | LSWLLRLLN-G446 | 1199 | | | |
| SEQ ID | anti-hHER2-HC-S119- | SEQ ID | 22854 | 24551 | 1.1 |
| NO: 250 | DS-ppan-MC-MMAF- | NO: | | | |
| | LEFIASKLA-T120 | 1201 | | | |
| SEQ ID | anti-hHER2-HC-T120- | SEQ ID | 21689 | 19734 | 0.9 |
| NO: 251 | DS-ppan-MC-MMAF- | NO: | | | |
| | LEFIASKLA-K121 | 1202 | | | |
| SEQ ID | anti-hHER2-HC-S136- | SEQ ID | 27232 | 24064 | 0.9 |
| NO: 257 | DS-ppan-MC-MMAF- | NO: | | | |
| | LEFIASKLA-137 | 1203 | | | |
| SEQ ID | anti-hHER2-HC-G138- | SEQ ID | 17184 | 15404 | 0.9 |
| NO: 259 | DS-ppan-MC-MMAF- | NO: | | | |
| | LEFIASKLA-T139 | 1204 | | | |
| SEQ ID | anti-hHER2-HC-S165- | SEQ ID | 12794 | 13854 | 1.1 |
| NO: 268 | DS-ppan-MC-MMAF- | NO: | | | |
| | LEFIASKLA-G166 | 1209 | | | |
| SEQ ID | anti-hHER2-HC-G194- | SEQ ID | 20659 | 21603 | 1.0 |
| NO: 277 | DS-ppan-MC-MMAF- | NO: | | | |
| | LEFIASKLA-T195 | 1215 | | | |
| SEQ ID | anti-hHER2-HC-L328- | SEQ ID | 7590 | 8039 | 1.1 |
| NO: 315 | DS-ppan-MC-MMAF- | NO: | | | |
| | LEFIASKLA-P329 | 1243 | | | |
| SEQ ID | anti-hHER2-HC-A330- | SEQ ID | 12960 | 14302 | 1.1 |
| NO: 317 | DS-ppan-MC-MMAF- | NO: | | | |
| | LEFIASKLA-P331 | 1245 | | | |
| SEQ ID | anti-hHER2-HC-E388- | SEQ ID | 21023 | 21257 | 1.0 |
| NO: 129 | DS-ppan-MC-MMAF- | NO: | | | |
| | LEFIASKLA-N389 | 1122 | | | |
| SEQ ID | anti-hHER2-HC-G446- | SEQ ID | 20329 | 16452 | 0.8 |
| NO: 349 | DS-ppan-MC-MMAF- | NO: | | | |
| | LEFIASKLA-K447 | 1270 | | | |
| SEQ ID | anti-hHER2-LC-V110- | SEQ ID | 17358 | 18734 | 1.1 |
| NO: 32 | GDS-ppan-MC-MMAF- | NO: | | | |
| | LSWLLRLLN-A111 | 1272 | | | |
| SEQ ID | anti-hHER2-LC-A111- | SEQ ID | 21011 | 20711 | 1.0 |
| NO: 33 | GDS-ppan-MC-MMAF- | NO: | | | |
| | LSWLLRLLN-A112 | 1273 | | | |
| SEQ ID | anti-hHER2-LC-Q155- | SEQ ID | 15444 | 17657 | 1.1 |
| NO: 46 | GDS-ppan-MC-MMAF- | NO: | | | |
| | LSWLLRLLN-S156 | 1284 | | | |
| SEQ ID | anti-hHER2-LC-S162- | SEQ ID | 11348 | 11645 | 1.0 |
| NO: 48 | GDS-ppan-MC-MMAF- | NO: | | | |
| | LSWLLRLLN-V163 | 1251 | | | |
| SEQ ID | anti-hHER2-LC-Q199- | SEQ ID | 16832 | 17973 | 1.1 |
| NO: 56 | GDS-ppan-MC-MMAF- | NO: | | | |
| | LSWLLRLLN-G200 | 1292 | | | |
| SEQ ID | anti-hHER2-LC-V110- | SEQ ID | 20373 | 24757 | 1.2 |
| NO: 63 | DS-ppan-MC-MMAF- | NO: | | | |
| | LEFIASKLA-A111 | 1294 | | | |
| SEQ ID | anti-hHER2-LC-A111- | SEQ ID | 16092 | 16196 | 1.0 |
| NO: 64 | DS-ppan-MC-MMAF- | NO: | | | |
| | LEFIASKLA-A112 | 1295 | | | |
| SEQ ID | anti-hHER2-LC-A153- | SEQ ID | 18406 | 19496 | 1.1 |
| NO: 75 | DS-ppan-MC-MMAF- | NO: | | | |
| | LEFIASKLA-L154 | 1305 | | | |
| SEQ ID | anti-hHER2-LC-L201- | SEQ ID | 17223 | 15036 | 0.9 |
| NO: 89 | DS-ppan-MC-MMAF- | NO: | | | |
| | LEFIASKLA-S202 | 1316 | | | |
| SEQ ID | anti-hHER2-HC-N389- | SEQ ID | n.d. | n.d. | n.d. |
| NO: 330 | DS-ppan-MC-MMAF- | NO: | | | |
| | LEFIASKLA-N390 | 1256 | | | |
| SEQ ID | anti-hHER2-HC-R255- | SEQ ID | 5657 | 6480 | 1.1 |
| NO: 195 | GDS-ppan-MC-MMAF- | NO: | | | |
| | LSWLLRLLN-T256 | 1167 | | | |
| SEQ ID | anti-hHER2-HC-P291- | SEQ ID | 23692 | 29456 | 1.2 |
| NO: 206 | GDS-ppan-MC-MMAF- | NO: | | | |
| | LSWLLRLLN-R292 | 1173 | | | |
| SEQ ID | anti-hHER2-HC-L235- | SEQ ID | 24430 | 27937 | 1.1 |
| NO: 288 | DS-ppan-MC-MMAF- | NO: | | | |
| | LEFIASKLA-G236 | 1221 | | | |
| SEQ ID | anti-hHER2-HC-A118- | SEQ ID | 22713 | 19408 | 0.9 |
| NO: 249 | DS-ppan-MC-MMAF- | NO: | | | |
| | LEFIASKLA-S119 | 1200 | | | |
| SEQ ID | anti-hHER2-HC-R344- | SEQ ID | 16731 | 19050 | 1.1 |
| NO: 323 | DS-ppan-MC-MMAF- | NO: | | | |
| | LEFIASKLA-E345 | 1251 | | | |
| SEQ ID | anti-hHER2-HC-P343- | SEQ ID | 18942 | 22948 | 1.2 |
| NO: 322 | DS-ppan-MC-MMAF- | NO: | | | |
| | LEFIASKLA-R344 | 1250 | | | |
| SEQ ID | anti-hHER2-HC-P271- | SEQ ID | 6651 | 7233 | 1.1 |
| NO: 301 | DS-ppan-MC-MMAF- | NO: | | | |
| | LEFIASKLA-E272 | 1233 | | | |
| SEQ ID | anti-hHER2-HC-Q196- | SEQ ID | 20702 | 24082 | 1.2 |
| NO: 279 | DS-ppan-MC-MMAF- | NO: | | | |
| | LEFIASKLA-T197 | 1217 | | | |
| SEQ ID | anti-hHER2-HC-S254- | SEQ ID | 2447 | 2783 | 1.1 |
| NO: 293 | DS-ppan-MC-MMAF- | NO: | | | |
| | LEFIASKLA-R255 | 1226 | | | |
| SEQ ID | anti-hHER2-HC-S254- | SEQ ID | 1609 | 1872 | 1.2 |
| NO: 194 | GDS-ppan-MC-MMAF- | NO: | | | |
| | LSWLLRLLN-R255 | 1166 | | | |
| SEQ ID | anti-hHER2-HC-R416- | SEQ ID | 20158 | 21424 | 1.1 |
| NO: 337 | DS-ppan-MC-MMAF- | NO: | | | |
| | LEFIASKLA-W417 | 1261 | | | |
| SEQ ID | anti-hHER2-HC-D270- | SEQ ID | 2566 | 2414 | 0.9 |
| NO: 201 | GDS-ppan-MC-MMAF- | NO: | | | |
| | LSWLLRLLN-P271 | 1171 | | | |
| SEQ ID | anti-hHER2-HC-A162- | SEQ ID | 26501 | 27992 | 1.1 |
| NO: 265 | DS-ppan-MC-MMAF- | NO: | | | |
| | LEFIASKLA-L163 | 1207 | | | |
| SEQ ID | anti-hHER2-HC-S191- | SEQ ID | 21971 | 25264 | 1.1 |
| NO: 274 | DS-ppan-MC-MMAF- | NO: | | | |
| | LEFIASKLA-S192 | 1213 | | | |
| SEQ ID | anti-hHER2-HC-S192- | SEQ ID | 25220 | 27786 | 1.1 |
| NO: 275 | DS-ppan-MC-MMAF- | NO: | | | |
| | LEFIASKLA-L193 | 1214 | | | |
| SEQ ID | anti-hHER2-HC-L193- | SEQ ID | n.d. | n.d. | n.d. |
| NO: 177 | GDS-ppan-MC-MMAF- | NO: | | | |
| | LSWLLRLLN-G194 | 1155 | | | |
| SEQ ID | anti-hHER2-HC-R255- | SEQ ID | 2435 | 2514 | 1.0 |
| NO: 294 | DS-ppan-MC-MMAF- | NO: | | | |
| | LEFIASKLA-T256 | 1227 | | | |
| SEQ ID | anti-hHER2-HC-H268- | SEQ ID | 1916 | 1927 | 1.0 |
| NO: 199 | GDS-ppan-MC-MMAF- | NO: | | | |
| | LSWLLRLLN-E269 | 1169 | | | |
| SEQ ID | anti-hHER2-HC-S267- | SEQ ID | 2481 | 2631 | 1.1 |
| NO: 198 | GDS-ppan-MC-MMAF- | NO: | | | |
| | LSWLLRLLN-H268 | 1168 | | | |
| SEQ ID | anti-hHER2-HC-L235- | SEQ ID | 15932 | 15515 | 1.0 |
| NO: 189 | GDS-ppan-MC-MMAF- | NO: | | | |
| | LSWLLRLLN-G236 | 1163 | | | |
| SEQ ID | anti-hHER2-HC-P343- | SEQ ID | 16217 | 17009 | 1.0 |
| NO: 223 | GDS-ppan-MC-MMAF- | NO: | | | |
| | LSWLLRLLN-R344 | 1185 | | | |
| SEQ ID | anti-hHER2-HC-I253- | SEQ ID | 3203 | 2996 | 0.9 |
| NO: 193 | GDS-ppan-MC-MMAF- | NO: | | | |
| | LSWLLRLLN-S254 | 1165 | | | |
| SEQ ID | anti-hHER2-HC-P206- | SEQ ID | n.d. | n.d. | n.d. |
| NO: 182 | GDS-ppan-MC-MMAF- | NO: | | | |
| | LSWLLRLLN-S207 | 1160 | | | |
| SEQ ID | anti-hHER2-HC-P257- | SEQ ID | 3036 | 2834 | 0.9 |
| NO: 296 | DS-ppan-MC-MMAF- | NO: | | | |
| | LEFIASKLA-E258 | 1228 | | | |
| SEQ ID | anti-hHER2-HC-T195- | SEQ ID | 23422 | 25475 | 1.1 |
| NO: 278 | DS-ppan-MC-MMAF- | NO: | | | |
| | LEFIASKLA-Q196 | 1216 | | | |
| SEQ ID | anti-hHER2-HC-A118- | SEQ ID | 14235 | 12465 | 0.9 |
| NO: 150 | GDS-ppan-MC-MMAF- | NO: | | | |
| | LSWLLRLLN-S119 | 1136 | | | |
| SEQ ID | anti-hHER2-HC-A231- | SEQ ID | 18890 | 18982 | 1.0 |
| NO: 185 | GDS-ppan-MC-MMAF- | NO: | | | |
| | LSWLLRLLN-P232 | 1161 | | | |
| SEQ ID | anti-hHER2-LC-E161- | SEQ ID | n.d. | n.d. | n.d. |
| NO: 47 | GDS-ppan-MC-MMAF- | NO: | | | |
| | LSWLLRLLN-S162 | 1285 | | | |
| SEQ ID | anti-hHER2-LC-S203- | SEQ ID | 18663 | 19769 | 1.1 |
| NO: 91 | DS-ppan-MC-MMAF- | NO: | | | |
| | LEFIASKLA-P204 | 1317 | | | |
| SEQ ID | anti-hHER2-LC-S203- | SEQ ID | 26363 | 31434 | 1.2 |
| NO: 60 | GDS-ppan-MC-MMAF- | NO: | | | |
| | LSWLLRLLN-P204 | 1318 | | | |
| SEQ ID | anti-hHER2-LC-K207- | SEQ ID | n.d. | n.d. | n.d. |
| NO: 61 | GDS-ppan-MC-MMAF- | NO: | | | |
| | LSWLLRLLN-S208 | 1319 | | | |
| SEQ ID | anti-hHER2-LC-S202- | SEQ ID | n.d. | n.d. | n.d. |
| NO: 90 | DS-ppan-MC-MMAF- | NO: | | | |
| | LEFIASKLA-S203 | 1320 | | | |
| SEQ ID | anti-hHER2-LC-A153- | SEQ ID | 22890 | 25331 | 1.1 |
| NO: 44 | GDS-ppan-MC-MMAF- | NO: | | | |
| | LSWLLRLLN-L154 | 1282 | | | |
| SEQ ID | anti-hHER2-HC-T164- | SEQ ID | 23675 | 24973 | 1.1 |
| NO: 267 | DS-ppan-MC-MMAF- | NO: | | | |
| | LEFIASKLA-S165 | 1208 | | | |
| SEQ ID | anti-hHER2-HC-S192- | SEQ ID | 21492 | 20712 | 1.0 |
| NO: 176 | GDS-ppan-MC-MMAF- | NO: | | | |
| | LSWLLRLLN-L193 | 1154 | | | |
| SEQ ID | anti-hHER2-HC-Q196- | SEQ ID | 19695 | 19974 | 1.0 |
| NO: 180 | GDS-ppan-MC-MMAF- | NO: | | | |
| | LSWLLRLLN-T197 | 1158 | | | |
| SEQ ID | anti-hHER2-HC-S191- | SEQ ID | 18430 | 16233 | 0.9 |
| NO: 175 | GDS-ppan-MC-MMAF- | NO: | | | |
| | LSWLLRLLN-S192 | 1153 | | | |
| SEQ ID | anti-hHER2-HC-G420- | SEQ ID | 32553 | 34202 | 1.1 |
| NO: 341 | DS-ppan-MC-MMAF- | NO: | | | |
| | LEFIASKLA-N421 | 1265 | | | |
| SEQ ID | anti-hHER2-HC-G236- | SEQ ID | 14771 | 16398 | 1.1 |
| NO: 289 | DS-ppan-MC-MMAF- | NO: | | | |
| | LEFIASKLA-G237 | 1222 | | | |
| SEQ ID | anti-hHER2-HC-N421- | SEQ ID | n.d. | n.d. | n.d. |
| NO: 342 | DS-ppan-MC-MMAF- | NO: | | | |
| | LEFIASKLA-V422 | 1266 | | | |
| SEQ ID | anti-hHER2-LC-L154- | SEQ ID | n.d. | n.d. | n.d. |
| NO: 45 | GDS-ppan-MC-MMAF- | NO: | | | |
| | LSWLLRLLN-Q155 | 1283 | | | |
| SEQ ID | anti-hHER2-HC-R416- | SEQ ID | 15181 | 18255 | 1.2 |
| NO: 237 | GDS-ppan-MC-MMAF- | NO: | | | |
| | LSWLLRLLN-W417 | 1193 | | | |
| SEQ ID | anti-hHER2-HC-E233- | SEQ ID | n.d. | n.d. | n.d. |
| NO: 187 | GDS-ppan-MC-MMAF- | NO: | | | |
| | LSWLLRLLN-L234 | 1162 | | | |
| SEQ ID | anti-hHER2-HC-G138- | SEQ ID | 21276 | 24046 | 1.1 |
| NO: 160 | GDS-ppan-MC-MMAF- | NO: | | | |
| | LSWLLRLLN-T139 | 1141 | | | |
| SEQ ID | anti-hHER2-HC-L163- | SEQ ID | n.d. | n.d. | n.d. |
| NO: 372 | GDS-ppan-MC-MMAF- | NO: | | | |
| | LDMLEWSLM-T164 | 1322 | | | |
| SEQ ID | anti-hHER2-HC-S165- | SEQ ID | 21008 | 23328 | 1.1 |
| NO: 374 | GDS-ppan-MC-MMAF- | NO: | | | |
| | LDMLEWSLM-G166 | 1323 | | | |
| SEQ ID | anti-hHER2-HC-S190- | SEQ ID | n.d. | n.d. | n.d. |
| NO: 376 | GDS-ppan-MC-MMAF- | NO: | | | |
| | LDMLEWSLM-S191 | 1324 | | | |
| SEQ ID | anti-hHER2-HC-S191- | SEQ ID | 27588 | 28786 | 1.0 |
| NO: 377 | GDS-ppan-MC-MMAF- | NO: | | | |
| | LDMLEWSLM-S192 | 1325 | | | |
| SEQ ID | anti-hHER2-HC-S192- | SEQ ID | 27124 | 24221 | 0.9 |
| NO: 378 | GDS-ppan-MC-MMAF- | NO: | | | |
| | LDMLEWSLM-L193 | 1326 | | | |
| SEQ ID | anti-hHER2-HC-G194- | SEQ ID | 23858 | 27185 | 1.1 |
| NO: 380 | GDS-ppan-MC-MAF- | NO: | | | |
| | LDMLEWSLM-T195 | 1327 | | | |
| SEQ ID | anti-hHER2-LC-T109- | SEQ ID | 21940 | 19449 | 0.9 |
| NO: 383 | GDS-ppan-MC-MMAF- | NO: | | | |
| | LDMLEWSLM-V110 | 1329 | | | |
| SEQ ID | anti-hHER2-HC-E269- | SEQ ID | 12525 | 14829 | 1.2 |
| NO: 299 | DS-ppan-MC-MMAF- | NO: | | | |
| | LEFIASKLA-D270 | 1231 | | | |
| SEQ ID | anti-hHER2-HC-D270- | SEQ ID | 12981 | 14803 | 1.1 |
| NO: 300 | DS-ppan-MC-MMAF- | NO: | | | |
| | LEFIASKLA-P271 | 1232 | | | |
| SEQ ID | anti-hHER2-LC-Q155- | SEQ ID | 30628 | 33193 | 1.1 |
| NO: 77 | DS-ppan-MC-MMAF- | NO: | | | |
| | LEFIASKLA-S156 | 1307 | | | |
| SEQ ID | anti-hHER2-HC-G161- | SEQ ID | 23116 | 25913 | 1.1 |
| NO: 370 | GDS-ppan-MC-MMAF- | NO: | | | |
| | LDMLEWSLM-A162 | 1321 | | | |
| SEQ ID | anti-hHER2-HC-T195- | SEQ ID | 25023 | 26308 | 1.1 |
| NO: 381 | GDS-ppan-MC-MMAF- | NO: | | | |
| | LDMLEWSLM-Q196 | 1328 | | | |
| SEQ ID | anti-hHER2-LC-V110- | SEQ ID | 27475 | 31910 | 1.2 |
| NO: 384 | GDS-ppan-MC-MMAF- | NO: | | | |
| | LDMLEWSLM-A111 | 1330 | | | |

^{a}Name represents part of the HC or LC that contains the peptide tag with the attached compound, the paired wildtype chain is not listed.
^{b}Area-under-the-curve measured by anti-human IgG ELISA.
^{c}Area-under-the-curve measured by anti-MMAF ELISA.
n.d., not determined.

### Example 27

### Labeling of Peptide-Tagged IgGs with a Co-Expressed 4′-Phosphopantetheinyl Transferase in Cell-Culture Medium

[0904] In order to streamline the process of preparing ADCs, enzymatic labeling of peptide-tagged antibodies with co-expressed 4′-phosphopantetheinyl transferase (PPTase) was carried out in Freestyle™ expression media (Invitrogen). In addition to reducing the number of purification steps, co-expression of the PPTase during antibody production could circumvent problems associated with the addition and the removal of a recombinantly produced version of such an enzyme. As a proof-of-concept, AcpS PPTase from E. coli was used to site-specifically conjugate an A1-tagged antibody with acetyl coenzyme A (acetyl CoA) in cell-culture medium.

[0905] To facilitate co-expression, the gene encoding the AcpS PPTase was cloned into the mammalian expression vector pRS, which appends the N-terminal signal sequence MKTFILLLWVLLLWVIFLLPGATA (SEQ ID NO:355). The construct, pRS-AcpS, also adds a C-terminal His₆ tag to the recombinant enzyme (SEQ ID NO: 1106). To co-express the A1-tagged antibody mAb2-HC-E388-GDSLDMLEWSLM-N389 (SEQ ID NO:356), an oligonucleotide fragment encoding the 12-amino-acid A1 peptide sequence was inserted into the heavy chain gene of the antibody mAb2-HC (SEQ ID NO:147) in the mammalian expression vector pM4, resulting in the construct pM4-A1. This plasmid also co-expresses the corresponding light chain under the CMV promoter. Using the PEI method (Meissner et al., 2001), 293 Freestyle™ cells were transiently transfected with a 1:1 mixture of the recombinant expression plasmids pM4-A1 and pRS-AcpS, and cultured in five aliquots of 200 mL of Freestyle™ expression media (Invitrogen) for five days at 37° C. under 5% CO₂. Next, the cell cultures were harvested by centrifugation at 2,000 rpm for 10 min, passed through 0.22 μm filters, and pooled. To determine the minimum antibody and enzyme concentrations required for efficient conjugate formation in cell-culture medium, aliquots of filtrate were either left unconcentrated or concentrated 2-fold, 5-fold, 10-fold, and 20-fold using 30 kDa cut-off Amicon Ultra centrifugal filter units (EMD Millipore). The concentrated samples were centrifuged at 3,724×g for 2 min to remove precipitate. In order to optimize the cell-culture medium conditions for AcpS catalysis, all samples were supplemented with 10-fold reaction buffer (pH 8.8) to a final concentration of 75 mM of Tris-HCl and 10 mM of MgCl₂. The labeling reactions were then initiated by addition of acetyl CoA substrate (Sigma-Aldrich) to a final concentration of 1 mM. The resulting reaction mixtures with volumes of 1.5 mL to 15 mL were incubated for approximately 16 h at 37° C.

[0906] To determine the degree of labeling of the A1-tagged antibody as well as to quantify expression levels of both enzyme and antibody, all reaction mixtures were purified by Ni-NTA and Protein A affinity chromatography, respectively. With the exception of the unconcentrated sample, all reaction mixtures were diluted two-fold with PBS prior to loading onto PBS-equilibrated Protein A-Sepharose columns (0.5 mL bed volume, GE Healthcare) at an approximate flowrate of 1 mL/min. The column flowthrough was directly applied to PBS-equilibrated IMAC columns filled with 0.5 mL of Ni-NTA Agarose (Qiagen). All Protein A and Ni-NTA affinity columns were washed with 40 column volumes of 50 mM of Tris-HCl buffer (pH 8) supplemented with 300 mM of NaCl and 20 mM of imidazole. His₆-tagged (SEQ ID NO: 1106) AcpS enzyme was eluted from the Ni-NTA affinity columns with 6 column volumes of 50 mM of Tris-HCl buffer (pH 8) containing 300 mM of NaCl and 250 mM of imidazole. Likewise, the A1-tagged antibody was eluted from the Protein A affinity columns with 6 column volumes of 0.1 M sodium acetate buffer (pH 3.0) followed by immediate neutralization with 12% (v/v) of 1 M of Tris-HCl buffer (pH 10).

[0907] SDS-PAGE and ESI-MS confirmed elution of AcpS enzyme and A1-tagged antibody, respectively. UV-Vis and Bradford measurements indicated that between 0.17 mg to 0.34 mg of A1-tagged antibody and between 0.12 mg to 0.15 mg of AcpS enzyme were recovered (Table 26). This suggests an antibody concentration ranging from 0.08 μM (13 mg/L) in unconcentrated cell-culture medium to 1.5 μM (230 mg/L) in 20-fold concentrated cell-culture medium during the labeling reactions with acetyl CoA. Hence, the concentration of the A1-tagged antibody is approximately proportional to the concentration factor of the cell-culture medium. Similarly, the concentration of the AcpS PPTase increases from 0.6 μM (9 mg/L) in unconcentrated cell-culture medium to 6.8 μM (100 mg/L) in 20-fold concentrated cell-culture medium.

TABLE 26
Expression yields of mAb2-HC-E388-GDSLDMLEWSLM-N389 (SEQ
ID NO: 356) and AcpS PPTase as well as mass spectrometric
evaluation of enzymatic labeling in cell-culture medium.

| | | | Yield of mAb2- | | | |
|---|---|---|---|---|---|---|
| | | AcpS conc. | HC-E388- | Ab conc. | | |
| | Yield of | during in- | GDSLDMLEW | during in- | | |
| Concentration | AcpS | medium | SLM-N389 | medium | | |
| factor of cell- | PPTase | labeling | (SEQ ID NO: | labeling | Observed | Expected |
| culture medium | (mg)^{a} | (μM) | 356) (mg)^{b} | (μM) | mass (Da) | mass (Da)^{c} |
| 1 x | 0.14 | 0.6 | 0.19 | 0.08 | 51927.89 | Uncoupled, |
| | | | | | 51587.6 | 51589.2 |
| 2 x | 0.12 | 1.1 | 0.17 | 0.16 | 51927.56 | Coupled, |
| 5 x | 0.14 | 1.9 | 0.31 | 0.41 | 51927.94 | 51971.6 |
| 10 x | 0.14 | 3.8 | 0.32 | 0.85 | 51927.94 | Coupled and |
| 20 x | 0.15 | 6.8 | 0.34 | 1.5 | 51928.1 | deacetylated, |
| | | | | | | 51929.6 |

^{a}Yield from 13 mL (conc. factor 1x), 12 mL (conc. factor 2x), 22 mL (conc. factor 5-10x), and 26 mL (conc. factor 20x) of culture according to Bradford analysis (average of two measurements).
^{b}Yield according to UV-Vis measurements on a NanoDrop ND-1000 Spectrophotometer (average of two measurements).
^{c}Expected masses are shown for pyroglutamic acid formation of the N-terminal glutamine residue of the heavy chain after signal peptide cleavage.

[0908] The purified antibody constructs were concentrated using 30 kDa cut-off Amicon Ultra centrifugal filter units, reduced, and deglycosylated followed by mass spectrometric analysis on an Agilent 6520 Q-TOF instrument (Agilent Technologies). As shown in Table 26, a two-fold concentration factor of the conditioned cell-culture medium is sufficient for near quantitative conjugation in the presence of 1 mM of acetyl CoA substrate, 0.16 μM (24 mg/L) of A1-tagged antibody, and 1.1 μM (17 mg/L) of AcpS enzyme. Notably, the acetyl group of the acetyl CoA substrate is completely cleaved off during in-medium labeling, thereby indicating hydrolysis of the thioester bond in conditioned cell-culture medium. In an independent experiment with 30-fold concentrated cell-culture medium, it was found that in the absence of exogenously added acetyl CoA, no conjugate formation was detectable by mass spectrometry. This negative control therefore excludes the presence of significant amounts of CoA or one of its analogues in the cell-culture medium.

[0909] In summary, the experiment demonstrates that a peptide-tagged antibody can be quantitatively labeled with a supplemented CoA analogue in 2-fold concentrated cell-culture medium via PPTase catalysis. Because antibody concentrations during fermentation of production cell lines is significantly higher than in the current proof-of-concept experiments, it can be anticipated that enzymatic conjugation of supplemented CoA analogues to a peptide-tagged antibody will be scalable to production levels. The supplemented CoA analogues will feature a thiol group, a protected thiol group or a bioorthogonal reactive group such as an aldehyde, a keto group, an azido or an alkyne group. Following Protein A purification, the antibody enzymatically activated with a reactive group could be reacted with a complementary toxin analogue to afford the corresponding ADC in the second step.

### Example 28

### Site-Specific Modification of a Peptide-Tagged Antibody with Ketone CoA in Cell-Culture Medium

[0910] The goal of this experiment is to demonstrate the feasibility to site-specifically attach a bioorthogonal group to a peptide-tagged antibody in conditioned cell-culture medium. The first step of the two-step method was carried out with the ketone CoA analogue whose synthesis has been described in Example 23. Successful in-medium labeling of a peptide-tagged antibody with this carbonyl-functionalized CoA analogue will allow subsequent attachment of an aminooxy-functionalized payload via oxime ligation in the second step of the two-step method (see also FIG. 22).

[0911] Using the PEI method (Meissner et al., 2001), 293 Freestyle™ cells were transiently transfected with a 1:1 mixture of the recombinant expression plasmids pM4-A1 and pRS-AcpS, which have been described in Example 27. After culturing the co-transfected mammalian cells in 400 mL of Freestyle™ expression media (Invitrogen) for five days at 37° C. under 5% CO₂, the cell culture was harvested by centrifugation at 2,000 rpm for 10 min and passed through 0.22 μm filters. Next, an aliquot of 60 mL of cleared cell-culture medium was concentrated 20-fold using 30 kDa cut-off Amicon Ultra centrifugal filter units (EMD Millipore). After removing precipitate by centrifugation at 3,724×g for 5 min, the labeling reaction was initiated by supplementing 1.31 mL of concentrate with ketone CoA at a final concentration of 1 mM and 10-fold reaction buffer (pH 8.8) at a final concentration of 75 mM of Tris-HCl and 10 mM of MgCl₂. The enzymatic reaction in a total volume of 1.5 mL was incubated for approximately 16 h at 37° C.

[0912] Prior to analyzing the degree of labeling with carbonyl-functionalized CoA analogue by mass spectrometry, the reaction mixture was purified by protein A affinity chromatography. After two-fold dilution with PBS, the diluted reaction mixture was loaded onto a PBS-equilibrated Protein A-Sepharose column (0.6 mL bed volume, GE Healthcare) at an approximate flowrate of 1 mL/min. The column matrix was washed with approximately 40 bed volumes of PBS before the retained material was eluted with 6 column volumes of 0.1 M sodium acetate buffer (pH 3). Finally, the eluate was neutralized by addition of 12% (v/v) of 1 M of Tris-HCl buffer (pH 10).

[0913] The purity of the antibody was assessed by reducing SDS-PAGE. According to UV-Vis measurements on a NanoDrop ND-1000 Spectrophotometer, 0.34 mg of antibody was recovered, corresponding to an antibody concentration of 1.5 μM (230 mg/L) in the 20-fold concentrated cell-culture medium. This exactly reproduces the measured antibody concentration during the labeling reaction with acetyl CoA in 20-fold concentrated cell-culture medium (Example 27). To assess the degree of antibody labeling with ketone CoA by mass spectrometry, the neutralized eluate was concentrated using 30 kDa cut-off Amicon Ultra centrifugal filter units, deglycosylated, and reduced. Mass spectrometric analysis on an Agilent 6520 Q-TOF instrument indicated formation of the desired carbonyl-functionalized antibody conjugate (observed, 51995.32; expected, 51999.6), with formation of about 24% of 4′-phospho-pantetheine-modified antibody as a side product (observed, 51925.42; expected, 51929.6). No unconjugated antibody was detectable in the deconvoluted mass spectrum (expected, 51589.2). The presence of 4′-phosphopantetheine-modified antibody as a side product might be explained by the incomplete formation of ketone CoA during the reaction between CoA-SH and methyl vinyl ketone (Example 23).

[0914] The experimental results indicate the feasibility of site-specific conjugation of carbonyl groups to antibodies in conditioned cell-culture medium. This approach can be extended to other bioorthogonal groups such as azido and alkyne moieties. Such bioorthogonal groups are completely inert in cell culture medium and exclusively react with the payload containing the complementary functional group, thereby ensuring the formation of homogeneous ADCs in the second step of the two-step method.

### Example 29

### In Vivo Efficacy Assessment of a ybbR-Tagged Trastuzumab MMAF ADC

[0915] The in vivo efficacy of the ybbR-tagged trastuzumab ADC anti-hHER2-HC-E388-DS-ppan-MC-MMAF-LEFIASKLA-N389 (SEQ ID NO: 1122) was assessed by using a xenograft tumor model, which is based on the implantation of a human tumor cell line into immune-deficient nude mice. As described previously (Sausville and Burger, 2006), studies with such tumor xenograft mice have provided valuable insights into the in vivo efficacy of anti-cancer reagents. Specifically, the in vivo efficacy study was carried out with nu/nu mice that were subcutaneously injected with MDA-MB231 clone 16 cells (Morton and Houghton, 2007). This cell line was chosen based on previous in vitro potency assays revealing its high sensitivity to the aforementioned ybbR-tagged MMAF ADC in an antigen dependent manner (see Table 24). After the tumor reached a size of about 200 mm³, the ybbR-tagged MMAF ADC was intravenously injected in a single dose at either 5 mg/kg or 3 mg/kg, with each treatment group comprising nine mice. After administering the antibody-drug conjugate, the tumor growth was monitored weekly. As shown in FIG. 23, i.v. administration of the ybbR-tagged MMAF ADC caused tumor regression at both dose levels. Furthermore, the treatment of the mice with the ADC was well tolerated with no weight loss observed in any of the treatment groups. The effective regression of MDA-MB231 clone 16 tumors at single doses as low as 3 mg/kg demonstrates that the ybbR-tagged ADC is efficacious in a HER2-dependent tumor mouse model. All animal studies were conducted in accordance with the Guide for the Care and Use of Laboratory Animals (NIH publication; National Academy Press, 8^{th} edition, 2001).

What is claimed is:

1. A modified antibody or fragment thereof, which comprises at least one peptide tag that is a substrate of 4′-phosphopantetheinyl transferase, and is located within the structural loop of said antibody or fragment thereof.

2. The modified antibody or fragment thereof of claim 1, wherein said 4′-phosphopantetheinyl transferase is Sfp, AcpS, T. maritima PPTase, human PPTase or a mutant or homolog form thereof that retains the 4′-phosphopantetheinyl transferase activity.

3. The modified antibody or fragment thereof of claim 1 or claim 2, wherein the peptide tag is selected from the group consisting of:
(SEQ ID NO: 1)
GDSLSWLLRLLN,
(SEQ ID NO: 2)
GDSLSWL,
(SEQ ID NO: 3)
GDSLSWLVRCLN,
(SEQ ID NO: 4)
GDSLSWLLRCLN,
(SEQ ID NO: 5)
GDSLSWLVRLLN,
(SEQ ID NO: 6)
GDSLSWLLRSLN,
(SEQ ID NO: 7)
GSQDVLDSLEFIASKLA,
(SEQ ID NO: 8)
VLDSLEFIASKLA,
(SEQ ID NO: 9)
DSLEFIASKLA,
(SEQ ID NO: 10)
GDSLDMLEWSLM,
(SEQ ID NO: 11)
GDSLDMLEWSL,
(SEQ ID NO: 12)
GDSLDMLEWS,
(SEQ ID NO: 13)
GDSLDMLEW,
(SEQ ID NO: 14)
DSLDMLEW,
(SEQ ID NO: 15)
GDSLDM,
(SEQ ID NO: 16)
LDSVRMMALAAR,
(SEQ ID NO: 17)
LDSLDMLEWSLR,
(SEQ ID NO: 18)
DSLEFIASKL,
(SEQ ID NO: 19)
DSLEFIASK,
(SEQ ID NO: 20)
DVLDSLEFI,
(SEQ ID NO: 21)
VLDSLEFIAS,
and
(SEQ ID NO: 1132)
DSLDMLEWSL.

4. The modified antibody or fragment thereof of any one of claims 1-3, wherein the peptide tag is located within the structural loop of VH, VL, CH1, CH2, CH3, or C_{L} region of the antibody or fragment thereof.

5. The modified antibody or fragment thereof of any one of claims 1-4, wherein said the peptide tag is located within the structural loop of the CH1 region of the antibody or fragment thereof.

6. The modified antibody or fragment thereof of any one of claims 1-4, wherein said peptide tag is inserted between any two amino acids that are listed in Table 1.

7. The modified antibody or fragment thereof of any one of claims 1-4, wherein the peptide tag is inserted between amino acid residues 2 and 3 of the VH or VL domain, or between amino acid residue 110 and 111 of the light chain, or between 119 and 120, or between 120 and 121, or between 135 and 136, or between 136 and 137, or between 138 and 139, or between 162 and 163, or between 164 and 165, or between 165 and 166, or between 194 and 195, or between 195 and 196 of the CH1 domain, or between 388 and 389, or between 445 and 446, or between 446 and 447 of the CH3 domain of a parental antibody or fragment thereof.

8. The modified antibody or fragment thereof of any one of claims 1-4, wherein the peptide tag is inserted between amino acid residue 110 and 111 of the light chain, or between 119 and 120, or between 120 and 121, or between 135 and 136, or between 136 and 137, or between 138 and 139, or between 162 and 163, or between 164 and 165, or between 165 and 166, or between 194 and 195, or between 195 and 196 of the CH1 domain, or between 388 and 389 of the CH3 domain of a parental antibody or fragment thereof.

9. The modified antibody or fragment thereof of any one of claims 1-4, wherein the peptide tag is grafted between amino acid residues 62 to 64 or 62 to 65 of the V_{H} domain, or between amino acid residues 133 and 138 of the CH1 domain, or between 189 and 195 of the CH1 domain, or between 190 and 197 of the CH1 domain.

10. The modified antibody or fragment thereof of any one of claims 1-4, wherein said antibody comprises SEQ ID NO:26, SEQ ID NO:27, SEQ ID NO:32, SEQ ID NO:63, SEQ ID NO:94, SEQ ID NO:95, SEQ ID NO:96, SEQ ID NO:126, SEQ ID NO:127, SEQ ID NO:129, SEQ ID NO:130, SEQ ID NO:131, SEQ ID NO:132, SEQ ID NO:139, SEQ ID NO:149, SEQ ID NO:151, SEQ ID NO:152, SEQ ID NO:157, SEQ ID NO:158, SEQ ID NO:160, SEQ ID NO:166, SEQ ID NO:168, SEQ ID NO:169, SEQ ID NO:178, SEQ ID NO:179, SEQ ID NO:248, SEQ ID NO:250, SEQ ID NO:251, SEQ ID NO:256, SEQ ID NO:257, SEQ ID NO:259, SEQ ID NO:265, SEQ ID NO:267, SEQ ID NO:268, SEQ ID NO:277, SEQ ID NO:278, SEQ ID NO:348, SEQ ID NO:349, SEQ ID NO:356, SEQ ID NO:358, SEQ ID NO:359, SEQ ID NO:364, SEQ ID NO:365, SEQ ID NO:367, SEQ ID NO:371, SEQ ID NO:373, SEQ ID NO:374, SEQ ID NO:380, SEQ ID NO:381, SEQ ID NO:384, SEQ ID NO:386, SEQ ID NO:387, or SEQ ID NO:388.

11. The modified antibody or fragment thereof of any one of claims 1-4, wherein said antibody comprises SEQ ID NO:32, SEQ ID NO:63, SEQ ID NO:127, SEQ ID NO:129, SEQ ID NO:132, SEQ ID NO:151, SEQ ID NO:152, SEQ ID NO:157, SEQ ID NO:158, SEQ ID NO:160, SEQ ID NO:166, SEQ ID NO:168, SEQ ID NO:169, SEQ ID NO:178, SEQ ID NO:179, SEQ ID NO:250, SEQ ID NO:251, SEQ ID NO:256, SEQ ID NO:257, SEQ ID NO:259, SEQ ID NO:265, SEQ ID NO:267, SEQ ID NO:268, SEQ ID NO:277, SEQ ID NO:278, SEQ ID NO:358, SEQ ID NO:359, SEQ ID NO:364, SEQ ID NO:365, SEQ ID NO:367, SEQ ID NO:371, SEQ ID NO:373, SEQ ID NO:374, SEQ ID NO:380, SEQ ID NO:381, or SEQ ID NO:384.

12. The modified antibody or fragment thereof of any one of claims 1-11, wherein the enzyme having 4′-phosphopantetheinyl transferase activity is Sfp and the peptide tag is GDSLSWLLRLLN (SEQ ID NO:1), GDSLSWLVRCLN (SEQ ID NO:3), GDSLSWLLRCLN (SEQ ID NO:4), GDSLSWLVRLLN (SEQ ID NO:5), GDSLSWLLRSLN (SEQ ID NO:6), GSQDVLDSLEFIASKLA (SEQ ID NO:7), VLDSLEFIASKLA (SEQ ID NO:8), DSLEFIASKLA (SEQ ID NO:9), GDSLDMLEWSLM (SEQ ID NO:10), GDSLDMLEWSL (SEQ ID NO:11), GDSLDMLEWS (SEQ ID NO:12), GDSLDMLEW (SEQ ID NO:13), DSLDMLEW (SEQ ID NO:14), LDSLDMLEWSLR (SEQ ID NO:17), DSLEFIASKL (SEQ ID NO:18), DSLEFIASK (SEQ ID NO:19), DSLEFIAS (SEQ ID NO:1116), or DSLDMLEWSL (SEQ ID NO: 1132).

13. The modified antibody or fragment thereof of any one of claims 1-12, wherein the enzyme having 4′-phosphopantetheinyl transferase activity is Sfp and the peptide tag is GDSLSWLLRLLN (SEQ ID NO:1), GDSLSWL (SEQ ID NO:2), DSLEFIASKLA (SEQ ID NO:9), GDSLDMLEWSLM (SEQ ID NO:10), DSLEFIASKL (SEQ ID NO:18), or DSLEFIASK (SEQ ID NO:19).

14. The modified antibody or fragment thereof of any one of claims 1-11, wherein the enzyme having 4′-phosphopantetheinyl transferase activity is AcpS and the peptide tag is GDSLDMLEWSLM (SEQ ID NO:10), GDSLDMLEWSL (SEQ ID NO:11), GDSLDMLEWS (SEQ ID NO:12), GDSLDMLEW (SEQ ID NO:13), DSLDMLEW (SEQ ID NO:14), GDSLDM (SEQ ID NO:15), LDSLDMLEWSLR (SEQ ID NO:17), or DSLDMLEWSL (SEQ ID NO: 1132).

15. The modified antibody or fragment thereof of any one of claims 1-14, wherein the antibody or fragment thereof is an isotype selected from IgG, IgM, IgE and IgA.

16. The modified antibody or fragment thereof of any one of claims 1-15, wherein the antibody or fragment thereof is a subtype of IgG selected from IgG1, IgG2, IgG3 and IgG4.

17. The modified antibody or fragment thereof of any one of claims 1-16, wherein the antibody or fragment thereof is a human or humanized antibody or fragment thereof.

18. The modified antibody or fragment thereof of claim 17, wherein the antibody or fragment thereof is an anti-HER2 antibody or anti-HER2 antibody fragment.

19. An immunoconjugate comprising the modified antibody or fragment of any one of claims 1-18, and a terminal group.

20. The immunoconjugate of claim 19, wherein said terminal group is attached to the modified antibody or antibody fragment by a linker having the structure according to Formula (I-b): [chemical structure]
wherein:
L₁ is a bond, a non-enzymatically cleavable linker, a non-cleavable linker; an enzymatically cleavable linker, a photo stable linker or a photo-cleavable linker;
L₂ is a bond, a non-enzymatically cleavable linker, a non-cleavable linker; an enzymatically cleavable linker, a photo stable linker or a photo-cleavable linker;
L₃ is a bond, a non-enzymatically cleavable linker, a non-cleavable linker; an enzymatically cleavable linker, a photo stable linker or a photo-cleavable linker;
L₄ is a bond, a non-enzymatically cleavable linker, a non-cleavable linker; an enzymatically cleavable linker, a photo stable linker, a photo-cleavable linker or a self-immolative spacer,
the * denotes where the 4′-phosphopantetheinyl moiety is attached to the peptide tag,
and wherein the terminal group is a drug moiety, an affinity probe, a chelator, a spectroscopic probe, a radioactive probe, an imaging reagent, a lipid molecule, a polyethylene glycol, a polymer, a nanoparticle, a quantum dot, a liposome, a PLGA particle, a polysaccharide, an acetyl group, or a surface.

21. The immunoconjugate of claim 20, wherein
L₁ is -A₁X²— or —X²—;
L₂ is a bond, -A₂-, or -A₂X²—;
L₃ is a bond, -A₃-, or -A₃X²—;
L₄ is a bond, -A₄-, -A₄X²—, [chemical structure] [chemical structure]
A₁ is —C(═O)NH—, —NHC(═O)—, —C(═O)NH(CH₂)ₙ—, —C(═O)NH(C(R⁴)₂)ₙ—, —(O(CH₂)ₙ)ₘ—, —(O(C(R⁴)₂)ₙ)ₘ—, —((CH₂)ₙO)ₘ—, —(((C(R⁴)₂)ₙO)ₘ—, —((CH₂)ₙO)ₘ(CH₂)ₙ—, —(((C(R⁴)₂)ₙO)ₘC(R⁴)₂)ₙ—, —(CH₂)ₙC(═O)NH—, —(C(R⁴)₂)ₙC(═O)NH—, —(CH₂)ₙNHC(═O)—, —(C(R⁴)₂)ₙNHC(═O)—, —NHC(═O)(CH₂)ₙ—, —NHC(═O)(C(R⁴)₂)ₙ—, —C(═O)NH(CH₂)ₙS—, —C(═O)NH(C(R⁴)₂)ₙS—, —S(CH₂)ₙC(═O)NH—, —S(C(R⁴)₂)ₙC(═O)NH—, —C(═O)NH(CH₂)ₙNHC(═O)(CH₂)ₙ—, —C(═O)NH(C(R⁴)₂)ₙNHC(═O)(C(R⁴)₂)ₙ—, —C(═O)(CH₂)ₙ—, —C(═O)(C(R⁴)₂)ₙ—, —(CH₂)ₙC(═O)—, —(C(R⁴)₂)ₙC(═O)—, —(CH₂)ₙ(O(CH₂)ₙ)ₘNHC(═O)(CH₂)ₙ—, —(C(R⁴)₂)ₙ(O(C(R⁴)₂)ₙ)ₘNHC(═O)(C(R⁴)₂)ₙ—, —(CH₂)ₙNHC(═O)(CH₂)ₙ—, —(C(R⁴)₂)ₙNHC(═O)(C(R⁴)₂)ₙ—, —(CH₂)ₙNH((CH₂)ₙO)ₘ(CH₂)ₙ—, —(C(R⁴)₂)ₙNH((C(R⁴)₂)ₙO)ₘ(C(R⁴)₂)ₙ—, —(O(CH₂)ₙ)ₘNHC(═O)(CH₂)ₙ—, or —(O(C(R⁴)₂)ₙ)ₘNHC(═O)(C(R⁴)₂)ₙ—;
A₂ is —C(═O)NH—, —C(═O)NH(CH₂)ₙ—, —C(═O)NH(C(R⁴)₂)ₙ—, —(O(CH₂)ₙ)ₘ—, —(O(C(R⁴)₂)ₙ)ₘ—, —((CH₂)ₙO)ₘ—, —(((C(R⁴)₂)ₙO)ₘ—, —((CH₂)ₙO)ₘ(CH₂)ₙ—, —(((C(R⁴)₂)ₙO)ₘC(R⁴)₂)ₙ—, —(CH₂)ₙC(═O)NH—, —(C(R⁴)₂)ₙC(═O)NR⁴—, —(CH₂)ₙNHC(═O)—, —(C(R⁴)₂)ₙNHC(═O)—, —NHC(═O)(CH₂)ₙ—, —NHC(═O)(C(R⁴)₂)ₙ—, —C(═O)NH(CH₂)ₙS—, —C(═O)NH(C(R⁴)₂)ₙS—, —S(CH₂)ₙC(═O)NH—, —S(C(R⁴)₂)ₙC(═O)NH—, —(CH₂)ₙS—, —(C(R⁴)₂)ₙS—, —S(CH₂)ₙ—, —S(C(R⁴)₂)ₙ—, —(CH₂)ₙNH—, —(C(R⁴)₂)ₙNH—, —C(═O)NH(CH₂)ₙNHC(═O)(CH₂)ₙ—, —C(═O)NH(C(R⁴)₂)ₙNHC(═O)(C(R⁴)₂)ₙ—, —C(═O)(CH₂)ₙ—, —C(═O)(C(R⁴)₂)ₙ—, —(CH₂)ₙC(═O)—, —(C(R⁴)₂)ₙC(═O)—, —(CH₂)ₙ(O(CH₂)ₙ)ₘNHC(═O)(CH₂)ₙ—, —(C(R⁴)₂)ₙ(O(C(R⁴)₂)ₙ)ₘNHC(═O)(C(R⁴)₂)ₙ—, —(CH₂)ₙ(O(CH₂)ₙ)ₘOC(═O)NH(CH₂)ₙ—, —(C(R⁴)₂)ₙ(O(C(R⁴)₂)ₙ)ₘOC(═O)NH(C(R⁴)₂)ₙ—, —(CH₂)ₙNHC(═O)(CH₂)ₙ—, —(C(R⁴)₂)ₙNHC(═O)(C(R⁴)₂)ₙ—, —(CH₂)ₙNH((CH₂)ₙO)ₘ(CH₂)ₙ—, —(C(R⁴)₂)ₙNH((C(R⁴)₂)ₙO)ₘ(C(R⁴)₂)ₙ—, —(O(CH₂)ₙ)ₘNHC(═O)(CH₂)ₙ—, —(O(C(R⁴)₂)ₙ)ₘNHC(═O)(C(R⁴)₂)ₙ—, [chemical structure]
A₃ is —C(═O)NH—, —C(═O)NH(CH₂)ₙ—, —C(═O)NH(C(R⁴)₂)ₙ—, —(O(CH₂)ₙ)ₘ—, —(O(C(R⁴)₂)ₙ)ₘ—, —((CH₂)ₙO)ₘ—, —(((C(R⁴)₂)ₙO)ₘ—, —((CH₂)ₙO)ₘ(CH₂)ₙ—, —(((C(R⁴)₂)ₙO)ₘC(R⁴)₂)ₙ—, —(CH₂)ₙC(═O)NH—, —(C(R⁴)₂)ₙC(═O)NH—, —(CH₂)ₙNHC(═O)—, —(C(R⁴)₂)ₙNHC(═O)—, —NHC(═O)(CH₂)ₙ—, —NHC(═O)(C(R⁴)₂)ₙ—, —C(═O)NH(CH₂)ₙS—, —C(═O)NH(C(R⁴)₂)ₙS—, —S(CH₂)ₙC(═O)NH—, —S(C(R⁴)₂)ₙC(═O)NH—, —(CH₂)ₙS—, —(C(R⁴)₂)ₙS—, —S(CH₂)ₙ—, —S(C(R⁴)₂)ₙ—, —C(═O)NH(CH₂)ₙNHC(═O)(CH₂)ₙ—, —C(═O)NH(C(R⁴)₂)ₙNHC(═O)(C(R⁴)₂)ₙ—, —C(═O)(CH₂)ₙ—, —C(═O)(C(R⁴)₂)ₙ—, —(CH₂)ₙC(═O)—, —(C(R⁴)₂)ₙC(═O)—, —(CH₂)ₙ(O(CH₂)ₙ)ₘNHC(═O)(CH₂)ₙ—, —(C(R⁴)₂)ₙ(O(C(R⁴)₂)ₙ)ₘNHC(═O)(C(R⁴)₂)ₙ—, —(CH₂)ₙ(O(CH₂)ₙ)ₘOC(═O)NH(CH₂)ₙ—, —(C(R⁴)₂)ₙ(O(C(R⁴)₂)ₙ)ₘOC(═O)NH(C(R⁴)₂)ₙ—, —(CH₂)ₙ(O(CH₂)ₙ)ₘOC(═O)—, —(C(R⁴)₂)ₙ(O(C(R⁴)₂)ₙ)ₘOC(═O)—, —(CH₂)ₙ(O(CH₂)ₙ)ₘOC(═O)—, —(C(R⁴)₂)ₙ(O(C(R⁴)₂)ₙ)ₘC(═O)—, —(CH₂)ₙNHC(═O)(CH₂)ₙ—, —(C(R⁴)₂)ₙNHC(═O)(C(R⁴)₂)ₙ—, —(O(CH₂)ₙ)ₘNHC(═O)(CH₂)ₙ—, —(O(C(R⁴)₂)ₙ)ₘNHC(═O)(C(R⁴)₂)ₙ—, [chemical structure]
A₄ is —C(═O)NH—, —C(═O)NH(CH₂)ₙ—, —C(═O)NH(C(R⁴)₂)ₙ—, —(O(CH₂)ₙ)ₘ—, —(O(C(R⁴)₂)ₙ)ₘ—, —((CH₂)ₙO)ₘ—, —(((C(R⁴)₂)ₙO)ₘ, —((CH₂)ₙO)ₘ(CH₂)ₙ—, —(((C(R⁴)₂)ₙO)ₘC(R⁴)₂)ₙ—, —(CH₂)ₙC(═O)NH—, —(C(R⁴)₂)ₙC(═O)NH—, —(CH₂)ₙNHC(═O)—, —(C(R⁴)₂)ₙNHC(═O)—, —NHC(═O)(CH₂)ₙ—, —NHC(═O)(C(R⁴)₂)ₙ—, —C(═O)NH(CH₂)ₙS—, —C(═O)NH(C(R⁴)₂)ₙS—, —S(CH₂)ₙC(═O)NH—, —S(C(R⁴)₂)ₙC(═O)NH—, —C(═O)NH(CH₂)ₙNHC(═O)(CH₂)ₙ—, —C(═O)NH(C(R⁴)₂)ₙNHC(═O)(C(R⁴)₂)ₙ—, —C(═O)(CH₂)ₙ—, —C(═O)(C(R⁴)₂)ₙ—, —(CH₂)ₙC(═O)—, —(C(R⁴)₂)ₙC(═O)—, —(CH₂)ₙ(O(CH₂)ₙ)ₘNHC(═O)(CH₂)ₙ—, —(C(R⁴)₂)ₙ(O(C(R⁴)₂)ₙ)ₘNHC(═O)(C(R⁴)₂)ₙ—, —(CH₂)ₙNHC(═O)(CH₂)ₙ—, —(C(R⁴)₂)ₙNHC(═O)(C(R⁴)₂)ₙ—, —(CH₂)ₙNH((CH₂)ₙO)ₘ(CH₂)ₙ—, —(C(R⁴)₂)ₙNH((C(R⁴)₂)ₙO)ₘ(C(R⁴)₂)ₙ—, —(O(CH₂)ₙ)ₘNHC(═O)(CH₂)ₙ—, or —(O(C(R⁴)₂)ₙ)ₘNHC(═O)(C(R⁴)₂)ₙ—;
each X² is independently selected from a bond, [chemical structure] [chemical structure] [chemical structure]
—S—, —Si(OH)₂O—, [chemical structure]
—CHR⁴(CH₂)ₙC(═O)NH—, —CHR⁴(CH₂)ₙNHC(═O)—, —C(═O)NH— and —NHC(═O)—;
each R⁴ is independently selected from H, C₁₋₄alkyl, —C(═O)OH and —OH,
each R⁵ is independently selected from H, C₁₋₄alkyl, phenyl or C₁₋₄alkyl substituted with 1 to 3 —OH groups;
each R⁶ is independently selected from H, fluoro, benzyloxy substituted with —C(═O)OH, benzyl substituted with —C(═O)OH, C₁₋₄alkoxy substituted with —C(═O)OH and C₁₋₄alkyl substituted with —C(═O)OH;
R⁷ is independently selected from H, phenyl and pyridine;
R⁸ is independently selected from [chemical structure]
R⁹ is independently selected from H and C₁₋₆haloalkyl;
each n is independently selected from 1, 2, 3, 4, 5, 6, 7, 8 and 9, and
each m is independently selected from 1, 2, 3, 4, 5, 6, 7, 8 and 9.

22. The immunoconjugate of claims 20-21, wherein
L₁ is -A₁X²— or —X²—;
L₂ is a bond, -A₂-, or -A₂X²—;
L₃ is a bond, -A₃-, or -A₃X²—;
L₄ is a bond, -A₄-, -A₄X²—, [chemical structure] [chemical structure]
A₁ is —C(═O)NH—, —C(═O)NH(CH₂)ₙ—, —C(═O)NH(CH₂)ₙS—, —(O(CH₂)ₙ)ₘ—, —((CH₂)ₙO)ₘ(CH₂)ₙ—, —NHC(═O)(CH₂)ₙ—, —(CH₂)ₙNHC(═O)—, —C(═O)NH(CH₂)ₙNHC(═O)(CH₂)ₙ—, —(CH₂)ₙNH((CH₂)ₙO)ₘ(CH₂)ₙ— or —(O(CH₂)ₙ)ₘNHC(═O)(CH₂)ₙ—;
A₂ is —C(═O)NH—, —C(═O)NH(CH₂)ₙ—, —C(═O)NH(CH₂)ₙS—, —(O(CH₂)ₙ)ₘ—, —((CH₂)ₙO)ₘ(CH₂)ₙ—, —NHC(═O)(CH₂)ₙ—, —(CH₂)ₙNHC(═O)—, —C(═O)NH(CH₂)ₙNHC(═O)(CH₂)ₙ—, —(CH₂)ₙNH((CH₂)ₙO)ₘ(CH₂)ₙ—, —(O(CH₂)ₙ)ₘNHC(═O)(CH₂)ₙ— or [chemical structure]
A₃ is —C(═O)NH—, —C(═O)NH(CH₂)ₙ—, —C(═O)NH(CH₂)ₙS—, —(O(CH₂)ₙ)ₘ—, —((CH₂)ₙO)ₘ(CH₂)ₙ—, —NHC(═O)(CH₂)ₙ—, —(CH₂)ₙNHC(═O)—, —C(═O)NH(CH₂)ₙNHC(═O)(CH₂)ₙ—, —(CH₂)ₙNH((CH₂)ₙO)ₘ(CH₂)ₙ—, —(O(CH₂)ₙ)ₘNHC(═O)(CH₂)ₙ— or [chemical structure]
A₄ is —C(═O)NH—, —C(═O)NH(CH₂)ₙ—, —C(═O)NH(CH₂)ₙS—, —(O(CH₂)ₙ)ₘ—, —((CH₂)ₙO)ₘ(CH₂)ₙ—, —NHC(═O)(CH₂)ₙ—, —(CH₂)ₙNHC(═O)—, —C(═O)NH(CH₂)ₙNHC(═O)(CH₂)ₙ—, —(CH₂)ₙNH((CH₂)ₙO)ₘ(CH₂)ₙ— or —(O(CH₂)ₙ)ₘNHC(═O)(CH₂)ₙ—;
each X² is independently selected from a bond, [chemical structure] [chemical structure] [chemical structure]
—S—, —Si(OH)₂O—, [chemical structure]
—CHR⁴(CH₂)ₙC(═O)NH—, —CHR⁴(CH₂)ₙNHC(═O)—, —C(═O)NH— and —NHC(═O)—;
each R⁴ is independently selected from H, C₁₋₄alkyl, —C(═O)OH and —OH,
each R⁵ is independently selected from H, C₁₋₄alkyl, phenyl or C₁₋₄alkyl substituted with 1 to 3 —OH groups;
each R⁶ is independently selected from H, fluoro, benzyloxy substituted with —C(═O)OH, benzyl substituted with —C(═O)OH, C₁₋₄alkoxy substituted with —C(═O)OH and C₁₋₄alkyl substituted with —C(═O)OH;
R⁷ is independently selected from H, phenyl and pyridine;
R⁸ is independently selected from [chemical structure]
R⁹ is independently selected from H and C₁₋₆haloalkyl;
each n is independently selected from 1, 2, 3, 4, 5, 6, 7, 8 and 9, and
each m is independently selected from 1, 2, 3, 4, 5, 6, 7, 8 and 9.

23. The immunoconjugate of claims 20-22, wherein the linker of Formula (I-b) is a linker having the structure according to Formula (I-c):

[chemical structure]

24. The immunoconjugate of claims 21-22, wherein
L₁ is -A₁X²—, where A₁ is —C(═O)NH(CH₂)ₙS— and X² is [chemical structure]
L₂ is a bond; L₃ is a bond, and L₄ is -A₄- wherein A₄ is —(CH₂)ₙNHC(═O)—.

25. The immunoconjugate of claims 21-22, wherein
L₁ is -A₁X²—, wherein A₁ is —C(═O)NH(CH₂)ₙS— and X² is [chemical structure]
L₂ is a bond; L₃ is a bond; L₄ is -A₄-, wherein A₄ is —(CH₂)ₙC(═O)—.

26. The immunoconjugate of claims 21-22, wherein
L₁ is -A₁X²—, wherein A₁ is —C(═O)NH(CH₂)ₙS— and X² is [chemical structure]
L₂ is -A₂-, wherein A₂ is —(CH₂)ₙC(═O;
L₃ is -A₃-, wherein A₃ is [chemical structure]
and
L₄ is

[chemical structure]

27. The immunoconjugate of claims 21-22, wherein
L₁ is a -A₁X²—, wherein A₁ is —C(═O)NH(CH₂)ₙS— and X² is —(CH₂)ₙC(═O)NH—;
L₂ is a bond-; L₃ is -A₃-, wherein A₃ is —(CH₂)ₙC(═O)—, and L₄ is a bond.

28. The immunoconjugate of claims 21-22, wherein
L₁ is a -A₁X²—, wherein A₁ is —C(═O)NH(CH₂)ₙS—, X² is —CHR⁴(CH₂)ₙC(═O)NH— and R⁴ is —C(═O)OH;
L₂ is a bond; L₃ is -A₃-, wherein A₃ is —(CH₂)ₙC(═O)— and. L₄ is a bond.

29. The immunoconjugate of claims 21-22, wherein
L₁ is -A₁X²—, where A₁ is —C(═O)NH(CH₂)ₙS— and X² is —(CH₂)C(═O)NH—;
L₂ is a bond; L₃ is a bond, and L₄ is -A₄- wherein A₄ is —(CH₂)ₙNHC(═O)—.

30. The immunoconjugate of claims 21-22, wherein
L₁ is -A₁X²—, wherein A₁ is —C(═O)NH(CH₂)ₙS— and X² is —(CH₂)C(═O)NH—;
L₂ is a bond; L₃ is a bond; L₄ is -A₄-, wherein A₄ is —(CH₂)ₙC(═O)—.

31. The immunoconjugate of claims 21-22, wherein
L₁ is -A₁X²—, wherein A₁ is —C(═O)NH(CH₂)ₙS— and X² is —(CH₂)C(═O)NH—;
L₂ is -A₂-, wherein A₂ is —(CH₂)ₙC(═O;
L₃ is -A₃-, wherein A₃ is [chemical structure]
and
L₄ is

[chemical structure]

32. The immunoconjugate of claims 21-22, wherein
L₁ is a -A₁X²—, wherein A₁ is —C(═O)NH(CH₂)ₙS— and X² is —(CH₂)C(═O)NH—;
L₂ is a bond-; L₃ is -A₃-, wherein A₃ is —(CH₂)ₙC(═O)—, and L₄ is a bond.

33. The immunoconjugate of claims 21-22, wherein
L₁ is a -A₁X²—, wherein A₁ is —C(═O)NH(CH₂)ₙS—, X² is —CHR⁴(CH₂)ₙC(═O)NH— and
R⁴ is —C(═O)OH;
L₂ is a bond; L₃ is -A₃-, wherein A₃ is —(CH₂)ₙC(═O)— and. L₄ is a bond.

34. The immunoconjugate of any one of claims 19 to 33, wherein the terminal group is a moiety selected from an anti-inflammatory agent, an anticancer agent, an antifungal agent, an antibacterial agent, an anti-parasitic agent, an anti-viral agent and an anesthetic agent.

35. The immunoconjugate of claim 34, wherein the terminal group is selected from a V-ATPase inhibitor, a HSP90 inhibitor, an IAP inhibitor, an mTor inhibitor, a microtubule stabilizer, a microtubule destabilizers, an auristatin, a dolastatin, a maytansinoid, a MetAP (methionine aminopeptidase), an inhibitor of nuclear export of proteins CRM1, a DPPIV inhibitor, an inhibitors of phosphoryl transfer reactions in mitochondria, a protein synthesis inhibitor, a CDK2 inhibitor, a CDK9 inhibitor, an Eg5 inhibitor, an HDAC inhibitor, a DNA damaging agent, a DNA alkylating agent, a DNA intercalator, a DNA minor groove binder, a proteasome inhibitor, an RNA polymerase inhibitor, and a DHFR inhibitor.

36. The immunoconjugate of any one of claims 19 to 33, wherein the terminal group is selected from a fluorophore, a chromophore, a quantum dot, a magnetic probe, a radioactive probe, an imaging reagent, or a contrast reagent.

37. The immunoconjugate of any of claims 19-33, wherein the affinity probe is biotin.

38. The immunoconjugate of any one of claims 19-37, wherein said modified antibody or fragment thereof further comprises one or more orthogonal conjugation sites.

39. The immunoconjugate of claim 38, wherein each orthogonal conjugation site is independently selected from a substrate of Sfp 4′-phosphopantetheinyl transferase, a substrate of AcpS 4′-phosphopantetheinyl transferase, a lysine, a cysteine, a tyrosine, a histidine, a formyl glycine, an unnatural amino acid, pyrrolysine and pyrroline-carboxylysine.

40. A pharmaceutical composition comprising an effective amount of the immunoconjugate of any one of claims 19-39, or a pharmaceutically acceptable salt thereof, and a pharmaceutically acceptable diluent, carrier or excipient.

41. The modified antibody or fragment thereof according to any of the claims 1-18, or the immunoconjugate according to any of the claims 19-39 for use as a medicament.

42. The modified antibody or fragment thereof according to any of the claims 1-18, or the immunoconjugate according to any of the claims 19-39 for use in the treatment of cancer, an inflammatory disease, or an infectious disease.

43. The modified antibody or fragment thereof according to any of the claims 1-18, or the immunoconjugate according to any of the claims 19-39 for use in the treatment of cancer.

44. A method of treating cancer comprising administering to a mammal in need thereof an effective amount of an immunoconjugate according to any one of claims 19-39, or the pharmaceutical composition of claim 40.

45. The method of claim 44, wherein said mammal is human.

46. A nucleic acid encoding the modified antibody or fragment thereof of any one of claims 1-18.

47. A host cell comprising the nucleic acid of claim 46.

48. The modified antibody of any of claims 1-18 or an antibody fragment thereof that is further conjugated to an anti-cancer agent.

49. A method of producing the immunoconjugate of claims 19-39 comprising incubating under suitable conditions the modified antibody or antibody fragment of any one of claims 1-18, a 4′-phosphopantetheinyl transferase, and a terminal group linked to CoA or a terminal group linked to a CoA analogue, thereby promoting formation of the immunoconjugate which comprises the antibody or antibody fragment and the terminal group linked together by a linker comprising a 4′-phosphopantetheine or a 4′-phosphopantetheine analogue.

50. A method of producing the immunoconjugate of claims 19-39 comprising
i) incubating under suitable conditions an antibody or antibody fragment of any one of claims 1-18 with a 4′-phosphopantetheinyl transferase and a CoA or CoA analogue, thereby attaching a 4′-phosphopantetheine or a 4′-phosphopantetheine analogue to the antibody or antibody fragment, wherein the 4′-phosphopantetheine and the 4′-phosphopantetheine analogue comprises a functional group,
and
ii) reacting the 4′-phosphopantetheine or the 4′-phosphopantetheine analogue with a reactive group optionally linked to a terminal group, thereby forming the immunoconjugate comprising the antibody or antibody fragment and the terminal group linked together by a linker comprising a 4′-phosphopantetheine or a 4′-phosphopantetheine analogue.

51. A method of producing the immunoconjugate of claims 19-39 comprising
i) incubating an under suitable conditions antibody or antibody fragment of any one of claims 1-18 with a 4′-phosphopantetheinyl transferase and a CoA or CoA analogue, thereby attaching a 4′-phosphopantetheine or a 4′-phosphopantetheine analogue to the antibody or antibody fragment, wherein the 4′-phosphopantetheine and the 4′-phosphopantetheine analogue comprises a protected functional group;
ii) deprotecting the protected functional group of the 4′-phosphopantetheine or the 4′-phosphopantetheine analogue,
and
iii) reacting the deprotected functional group of the 4′-phosphopantetheine or the 4′-phosphopantetheine analogue with a reactive group optionally linked to a terminal group, thereby forming the immunoconjugate comprising the antibody or antibody fragment and the terminal group linked together by a linker comprising a 4′-phosphopantetheine or a 4′-phosphopantetheine analogue.

52. The method of any one of claims 49-51, wherein said the suitable condition comprise a temperature between 4° C. to 37° C. and pH 6.5 to pH 9.0.

53. An immunoconjugate comprising the modified antibody or antibody fragment of any of claims 1-18, wherein a serine residue of the peptide tag in said modified antibody or antibody fragment is conjugated to a 4′-phosphopantetheine group having the structure of Formula (D-a), Formula (E-a), Formula (F-a) or Formula (G-a): [chemical structure]
wherein:
L₁ is -A₁X²— or —X²—;
L₂ is a bond, -A₂-, or -A₂X²—;
L₃ is a bond, -A₃-, or -A₃X²—;
L₄ is a bond, -A₄-, -A₄X²—, [chemical structure] [chemical structure]
A₁ is —C(═O)NH—, —NHC(═O)—, —C(═O)NH(CH₂)ₙ—, —C(═O)NH(C(R⁴)₂)ₙ—, —(O(CH₂)ₙ)ₘ—, —(O(C(R⁴)₂)ₙ)ₘ—, —((CH₂)ₙO)ₘ—, —(((C(R⁴)₂)ₙO)ₘ—, —((CH₂)ₙO)ₘ(CH₂)ₙ—, —(((C(R⁴)₂)ₙO)ₘC(R⁴)₂)ₙ—, —(CH₂)ₙC(═O)NH—, —(C(R⁴)₂)ₙC(═O)NH—, —(CH₂)ₙNHC(═O)—, —(C(R⁴)₂)ₙNHC(═O)—, —NHC(═O)(CH₂)ₙ—, —NHC(═O)(C(R⁴)₂)ₙ—, —C(═O)NH(CH₂)ₙS—, —C(═O)NH(C(R⁴)₂)ₙS—, —S(CH₂)ₙC(═O)NH—, —S(C(R⁴)₂)ₙC(═O)NH—, —C(═O)NH(CH₂)ₙNHC(═O)(CH₂)ₙ—, —C(═O)NH(C(R⁴)₂)ₙNHC(═O)(C(R⁴)₂)ₙ—, —C(═O)(CH₂)ₙ—, —C(═O)(C(R⁴)₂)ₙ—, —(CH₂)ₙC(═O)—, —(C(R⁴)₂)ₙC(═O)—, —(CH₂)ₙ(O(CH₂)ₙ)ₘNHC(═O)(CH₂)ₙ—, —(C(R⁴)₂)ₙ(O(C(R⁴)₂)ₙ)ₘNHC(═O)(C(R⁴)₂)ₙ—, —(CH₂)ₙNHC(═O)(CH₂)ₙ—, —(C(R⁴)₂)ₙNHC(═O)(C(R⁴)₂)ₙ—, —(CH₂)ₙNH((CH₂)ₙO)ₘ(CH₂)ₙ—, —(C(R⁴)₂)ₙNH((C(R⁴)₂)ₙO)ₘ(C(R⁴)₂)ₙ—, —(O(CH₂)ₙ)ₘNHC(═O)(CH₂)ₙ—, or —(O(C(R⁴)₂)ₙ)ₘNHC(═O)(C(R⁴)₂)ₙ—;
A₂ is —C(═O)NH—, —C(═O)NH(CH₂)ₙ—, —C(═O)NH(C(R⁴)₂)ₙ—, —(O(CH₂)ₙ)ₘ—, —(O(C(R⁴)₂)ₙ)ₘ—, —((CH₂)ₙO)ₘ—, —(((C(R⁴)₂)ₙO)ₘ—, —((CH₂)ₙO)ₘ(CH₂)ₙ—, —(((C(R⁴)₂)ₙO)ₘC(R⁴)₂)ₙ—, —(CH₂)ₙC(═O)NH—, —(C(R⁴)₂)ₙC(═O)NR⁴—, —(CH₂)ₙNHC(═O)—, —(C(R⁴)₂)ₙNHC(═O)—, —NHC(═O)(CH₂)ₙ—, —NHC(═O)(C(R⁴)₂)ₙ—, —C(═O)NH(CH₂)ₙS—, —C(═O)NH(C(R⁴)₂)ₙS—, —S(CH₂)ₙC(═O)NH—, —S(C(R⁴)₂)ₙC(═O)NH—, —(CH₂)ₙS—, —(C(R⁴)₂)ₙS—, —S(CH₂)ₙ—, —S(C(R⁴)₂)ₙ—, —(CH₂)ₙNH—, —(C(R⁴)₂)ₙNH—, —C(═O)NH(CH₂)ₙNHC(═O)(CH₂)ₙ—, —C(═O)NH(C(R⁴)₂)ₙNHC(═O)(C(R⁴)₂)ₙ—, —C(═O)(CH₂)ₙ—, —C(═O)(C(R⁴)₂)ₙ—, —(CH₂)ₙC(═O)—, —(C(R⁴)₂)ₙC(═O)—, —(CH₂)ₙ(O(CH₂)ₙ)ₘNHC(═O)(CH₂)ₙ—, —(C(R⁴)₂)ₙ(O(C(R⁴)₂)ₙ)ₘNHC(═O)(C(R⁴)₂)ₙ—, —(CH₂)ₙ(O(CH₂)ₙ)ₘOC(═O)NH(CH₂)ₙ—, —(C(R⁴)₂)ₙ(O(C(R⁴)₂)ₙ)ₘOC(═O)NH(C(R⁴)₂)ₙ—, —(CH₂)ₙNHC(═O)(CH₂)ₙ—, —(C(R⁴)₂)ₙNHC(═O)(C(R⁴)₂)ₙ—, —(CH₂)ₙNH((CH₂)ₙO)ₘ(CH₂)ₙ—, —(C(R⁴)₂)ₙNH((C(R⁴)₂)ₙO)ₘ(C(R⁴)₂)ₙ—, —(O(CH₂)ₙ)ₘNHC(═O)(CH₂)ₙ—, —
(O(C(R⁴)₂)ₙ)ₘNHC(═O)(C(R⁴)₂)ₙ—, [chemical structure]
A₃ is —C(═O)NH—, —C(═O)NH(CH₂)ₙ—, —C(═O)NH(C(R⁴)₂)ₙ—, —(O(CH₂)ₙ)ₘ—, —(O(C(R⁴)₂)ₙ)ₘ—, —((CH₂)ₙO)ₘ—, —(((C(R⁴)₂)ₙO)ₘ—, —((CH₂)ₙO)ₘ(CH₂)ₙ—, —(((C(R⁴)₂)ₙO)ₘC(R⁴)₂)ₙ—, —(CH₂)ₙC(═O)NH—, —(C(R⁴)₂)ₙC(═O)NH—, —(CH₂)ₙNHC(═O)—, —(C(R⁴)₂)ₙNHC(═O)—, —NHC(═O)(CH₂)ₙ—, —NHC(═O)(C(R⁴)₂)ₙ—, —C(═O)NH(CH₂)ₙS—, —C(═O)NH(C(R⁴)₂)ₙS—, —S(CH₂)ₙC(═O)NH—, —S(C(R⁴)₂)ₙC(═O)NH—, —(CH₂)ₙS—, —(C(R⁴)₂)ₙS—, —S(CH₂)ₙ—, —S(C(R⁴)₂)ₙ—, —C(═O)NH(CH₂)ₙNHC(═O)(CH₂)ₙ—, —C(═O)NH(C(R⁴)₂)ₙNHC(═O)(C(R⁴)₂)ₙ—, —C(═O)(CH₂)ₙ—, —C(═O)(C(R⁴)₂)ₙ—, —(CH₂)ₙC(═O)—, —(C(R⁴)₂)ₙC(═O)—, —(CH₂)ₙ(O(CH₂)ₙ)ₘNHC(═O)(CH₂)ₙ—, —(C(R⁴)₂)ₙ(O(C(R⁴)₂)ₙ)ₘNHC(═O)(C(R⁴)₂)ₙ—, —(CH₂)ₙ(O(CH₂)ₙ)ₘOC(═O)NH(CH₂)ₙ—, —(C(R⁴)₂)ₙ(O(C(R⁴)₂)ₙ)ₘOC(═O)NH(C(R⁴)₂)ₙ—, —(CH₂)ₙ(O(CH₂)ₙ)ₘOC(═O)—, —(C(R⁴)₂)ₙ(O(C(R⁴)₂)ₙ)ₘOC(═O)—, —(CH₂)ₙ(O(CH₂)ₙ)ₘOC(═O)—, —(C(R⁴)₂)ₙ(O(C(R⁴)₂)ₙ)ₘOC(═O)—, —(CH₂)ₙNHC(═O)(CH₂)ₙ—, —(C(R⁴)₂)ₙNHC(═O)(C(R⁴)₂)ₙ—, —(O(CH₂)ₙ)ₘNHC(═O)(CH₂)ₙ—, —(O(C(R⁴)₂)ₙ)ₘNHC(═O)(C(R⁴)₂)ₙ—, [chemical structure]
A₄ is —C(═O)NH—, —C(═O)NH(CH₂)ₙ—, —C(═O)NH(C(R⁴)₂)ₙ—, —(O(CH₂)ₙ)ₘ—, —(O(C(R⁴)₂)ₙ)ₘ—, —((CH₂)ₙO)ₘ—, —(((C(R⁴)₂)ₙO)ₘ—, —((CH₂)ₙO)ₘ(CH₂)ₙ—, —(((C(R⁴)₂)ₙO)ₘC(R⁴)₂)ₙ—, —(CH₂)ₙC(═O)NH—, —(C(R⁴)₂)ₙC(═O)NH—, —(CH₂)ₙNHC(═O)—, —(C(R⁴)₂)ₙNHC(═O)—, —NHC(═O)(CH₂)ₙ—, —NHC(═O)(C(R⁴)₂)ₙ—, —C(═O)NH(CH₂)ₙS—, —C(═O)NH(C(R⁴)₂)ₙS—, —S(CH₂)ₙC(═O)NH—, —S(C(R⁴)₂)ₙC(═O)NH—, —C(═O)NH(CH₂)ₙNHC(═O)(CH₂)ₙ—, —C(═O)NH(C(R⁴)₂)ₙNHC(═O)(C(R⁴)₂)ₙ—, —C(═O)(CH₂)ₙ—, —C(═O)(C(R⁴)₂)ₙ—, —(CH₂)ₙC(═O)—, —(C(R⁴)₂)ₙC(═O)—, —(CH₂)ₙ(O(CH₂)ₙ)ₘNHC(═O)(CH₂)ₙ—, —(C(R⁴)₂)ₙ(O(C(R⁴)₂)ₙ)ₘNHC(═O)(C(R⁴)₂)ₙ—, —(CH₂)ₙNHC(═O)(CH₂)ₙ—, —(C(R⁴)₂)ₙNHC(═O)(C(R⁴)₂)ₙ—, —(CH₂)ₙNH((CH₂)ₙO)ₘ(CH₂)ₙ—, —(C(R⁴)₂)ₙNH((C(R⁴)₂)ₙO)ₘ(C(R⁴)₂)ₙ—, —(O(CH₂)ₙ)ₘNHC(═O)(CH₂)ₙ—, or —(O(C(R⁴)₂)ₙ)ₘNHC(═O)(C(R⁴)₂)ₙ—;
each X² is independently selected from a bond, [chemical structure] [chemical structure] [chemical structure]
—S—, —Si(OH)₂O—, [chemical structure]
—CHR⁴(CH₂)ₙC(═O)NH—, —CHR⁴(CH₂)ₙNHC(═O)—, —C(═O)NH— and —NHC(═O)—;
each R⁴ is independently selected from H, C₁₋₄alkyl, —C(═O)OH and —OH,
each R⁵ is independently selected from H, C₁₋₄alkyl, phenyl or C₁₋₄alkyl substituted with 1 to 3 —OH groups;
each R⁶ is independently selected from H, fluoro, benzyloxy substituted with —C(═O)OH, benzyl substituted with —C(═O)OH, C₁₋₄alkoxy substituted with —C(═O)OH and C₁₋₄alkyl substituted with —C(═O)OH;
R⁷ is independently selected from H, phenyl and pyridine;
R⁸ is independently selected from [chemical structure]
R⁹ is independently selected from H and C₁₋₆haloalkyl;
each n is independently selected from 1, 2, 3, 4, 5, 6, 7, 8 and 9,
each m is independently selected from 1, 2, 3, 4, 5, 6, 7, 8 and 9, and
R¹ is a thiol, a maleimide, a haloacetamide, an alkyne, a triaryl phosphine, a cyclooctene, an oxanobornadiene, an azide, a diaryl tetrazine, a norbornene, a monoaryl tetrazine, a hydroxylamine, a hydrazine, NH₂—NH—C(═O)—, an aldehyde or a ketone.

54. The immunoconjugate of claim 53 wherein the 4′-phosphopantetheine group is

[chemical structure]

55. The immunoconjugate of claim 53 wherein the conjugated serine has a structure selected from:

[chemical structure]

56. The immunoconjugate of claim 55 wherein the conjugated serine is

[chemical structure]

57. An immunoconjugate comprising the modified antibody or antibody fragment of any of claims 1-18, wherein a serine residue of the peptide tag in said modified antibody or antibody fragment is conjugated to a modified 4′-phosphopantetheine group and has a structure selected from: [chemical structure]
wherein
L₁ is -A₁X²— or —X²—;
L₂ is a bond, -A₂-, or -A₂X²—;
L₃ is a bond, -A₃-, or -A₃X²—;
L₄ is a bond, -A₄-, -A₄X²—, [chemical structure] [chemical structure]
A₁ is —C(═O)NH—, —NHC(═O)—, —C(═O)NH(CH₂)ₙ—, —C(═O)NH(C(R⁴)₂)ₙ—, —(O(CH₂)ₙ)ₘ—, —(O(C(R⁴)₂)ₙ)ₘ—, —((CH₂)ₙO)ₘ—, —(((C(R⁴)₂)ₙO)ₘ—, —((CH₂)ₙO)ₘ(CH₂)ₙ—, —(((C(R⁴)₂)ₙO)ₘC(R⁴)₂)ₙ—, —(CH₂)ₙC(═O)NH—, —(C(R⁴)₂)ₙC(═O)NH—, —(CH₂)ₙNHC(═O)—, —(C(R⁴)₂)ₙNHC(═O)—, —NHC(═O)(CH₂)ₙ—, —NHC(═O)(C(R⁴)₂)ₙ—, —C(═O)NH(CH₂)ₙS—, —C(═O)NH(C(R⁴)₂)ₙS—, —S(CH₂)ₙC(═O)NH—, —S(C(R⁴)₂)ₙC(═O)NH—, —C(═O)NH(CH₂)ₙNHC(═O)(CH₂)ₙ—, —C(═O)NH(C(R⁴)₂)ₙNHC(═O)(C(R⁴)₂)ₙ—, —C(═O)(CH₂)ₙ—, —C(═O)(C(R⁴)₂)ₙ—, —(CH₂)ₙC(═O)—, —(C(R⁴)₂)ₙC(═O)—, —(CH₂)ₙ(O(CH₂)ₙ)ₘNHC(═O)(CH₂)ₙ—, —(C(R⁴)₂)ₙ(O(C(R⁴)₂)ₙ)ₘNHC(═O)(C(R⁴)₂)ₙ—, —(CH₂)ₙNHC(═O)(CH₂)ₙ—, —(C(R⁴)₂)ₙNHC(═O)(C(R⁴)₂)ₙ—, —(CH₂)ₙNH((CH₂)ₙO)ₘ(CH₂)ₙ—, —(C(R⁴)₂)ₙNH((C(R⁴)₂)ₙO)ₘ(C(R⁴)₂)ₙ—, —(O(CH₂)ₙ)ₘNHC(═O)(CH₂)ₙ—, or —(O(C(R⁴)₂)ₙ)ₘNHC(═O)(C(R⁴)₂)ₙ—;
A₂ is —C(═O)NH—, —C(═O)NH(CH₂)ₙ—, —C(═O)NH(C(R⁴)₂)ₙ—, —(O(CH₂)ₙ)ₘ—, —(O(C(R⁴)₂)ₙ)ₘ—, —((CH₂)ₙO)ₘ—, —(((C(R⁴)₂)ₙO)ₘ—, —((CH₂)ₙO)ₘ(CH₂)ₙ—, —(((C(R⁴)₂)ₙO)ₘC(R⁴)₂)ₙ—, —(CH₂)ₙC(═O)NH—, —(C(R⁴)₂)ₙC(═O)NR⁴—, —(CH₂)ₙNHC(═O)—, —(C(R⁴)₂)ₙNHC(═O)—, —NHC(═O)(CH₂)ₙ—, —NHC(═O)(C(R⁴)₂)ₙ—, —C(═O)NH(CH₂)ₙS—, —C(═O)NH(C(R⁴)₂)ₙS—, —S(CH₂)ₙC(═O)NH—, —S(C(R⁴)₂)ₙC(═O)NH—, —(CH₂)ₙS—, —(C(R⁴)₂)ₙS—, —S(CH₂)ₙ—, —S(C(R⁴)₂)ₙ—, —(CH₂)ₙNH—, —(C(R⁴)₂)ₙNH—, —C(═O)NH(CH₂)ₙNHC(═O)(CH₂)ₙ—, —C(═O)NH(C(R⁴)₂)ₙNHC(═O)(C(R⁴)₂)ₙ—, —C(═O)(CH₂)ₙ—, —C(═O)(C(R⁴)₂)ₙ—, —(CH₂)ₙC(═O)—, —(C(R⁴)₂)ₙC(═O)—, —(CH₂)ₙ(O(CH₂)ₙ)ₘNHC(═O)(CH₂)ₙ—, —(C(R⁴)₂)ₙ(O(C(R⁴)₂)ₙ)ₘNHC(═O)(C(R⁴)₂)ₙ—, —(CH₂)ₙ(O(CH₂)ₙ)ₘOC(═O)NH(CH₂)ₙ—, —(C(R⁴)₂)ₙ(O(C(R⁴)₂)ₙ)ₘOC(═O)NH(C(R⁴)₂)ₙ—, —(CH₂)ₙNHC(═O)(CH₂)ₙ—, —(C(R⁴)₂)ₙNHC(═O)(C(R⁴)₂)ₙ—, —(CH₂)ₙNH((CH₂)ₙO)ₘ(CH₂)ₙ—, —(C(R⁴)₂)ₙNH((C(R⁴)₂)ₙO)ₘ(C(R⁴)₂)ₙ—, —(O(CH₂)ₙ)ₘNHC(═O)(CH₂)ₙ—, —(O(C(R⁴)₂)ₙ)ₘNHC(═O)(C(R⁴)₂)ₙ—, [chemical structure]
A₃ is —C(═O)NH—, —C(═O)NH(CH₂)ₙ—, —C(═O)NH(C(R⁴)₂)ₙ—, —(O(CH₂)ₙ)ₘ—, —(O(C(R⁴)₂)ₙ)ₘ—, —((CH₂)ₙO)ₘ—, —(((C(R⁴)₂)ₙO)ₘ—, —((CH₂)ₙO)ₘ(CH₂)ₙ—, —(((C(R⁴)₂)ₙO)ₘC(R⁴)₂)ₙ—, —(CH₂)ₙC(═O)NH—, —(C(R⁴)₂)ₙC(═O)NH—, —(CH₂)ₙNHC(═O)—, —(C(R⁴)₂)ₙNHC(═O)—, —NHC(═O)(CH₂)ₙ—, —NHC(═O)(C(R⁴)₂)ₙ—, —C(═O)NH(CH₂)ₙS—, —C(═O)NH(C(R⁴)₂)ₙS—, —S(CH₂)ₙC(═O)NH—, —S(C(R⁴)₂)ₙC(═O)NH—, —(CH₂)ₙS—, —(C(R⁴)₂)ₙS—, —S(CH₂)ₙ—, —S(C(R⁴)₂)ₙ—, —C(═O)NH(CH₂)ₙNHC(═O)(CH₂)ₙ—, —C(═O)NH(C(R⁴)₂)ₙNHC(═O)(C(R⁴)₂)ₙ—, —C(═O)(CH₂)ₙ—, —C(═O)(C(R⁴)₂)ₙ—, —(CH₂)ₙC(═O)—, —(C(R⁴)₂)ₙC(═O)—, —(CH₂)ₙ(O(CH₂)ₙ)ₘNHC(═O)(CH₂)ₙ—, —(C(R⁴)₂)ₙ(O(C(R⁴)₂)ₙ)ₘNHC(═O)(C(R⁴)₂)ₙ—, —(CH₂)ₙ(O(CH₂)ₙ)ₘOC(═O)NH(CH₂)ₙ—, —(C(R⁴)₂)ₙ(O(C(R⁴)₂)ₙ)ₘOC(═O)NH(C(R⁴)₂)ₙ—, —(CH₂)ₙ(O(CH₂)ₙ)ₘOC(═O)—, —(C(R⁴)₂)ₙ(O(C(R⁴)₂)ₙ)ₘOC(═O)—, —(CH₂)ₙ(O(CH₂)ₙ)ₘOC(═O)—, —(C(R⁴)₂)ₙ(O(C(R⁴)₂)ₙ)ₘC(═O)—, —(CH₂)ₙNHC(═O)(CH₂)ₙ—, —(C(R⁴)₂)ₙNHC(═O)(C(R⁴)₂)ₙ—, —(O(CH₂)ₙ)ₘNHC(═O)(CH₂)ₙ—, —(O(C(R⁴)₂)ₙ)ₘNHC(═O)(C(R⁴)₂)ₙ—, [chemical structure]
A₄ is —C(═O)NH—, —C(═O)NH(CH₂)ₙ—, —C(═O)NH(C(R⁴)₂)ₙ—, —(O(CH₂)ₙ)ₘ—, —(O(C(R⁴)₂)ₙ)ₘ—, —((CH₂)ₙO)ₘ—, —(((C(R⁴)₂)ₙO)ₘ—, —((CH₂)ₙO)ₘ(CH₂)ₙ—, —(((C(R⁴)₂)ₙO)ₘC(R⁴)₂)ₙ—, —(CH₂)ₙC(═O)NH—, —(C(R⁴)₂)ₙC(═O)NH—, —(CH₂)ₙNHC(═O)—, —(C(R⁴)₂)ₙNHC(═O)—, —NHC(═O)(CH₂)ₙ—, —NHC(═O)(C(R⁴)₂)ₙ—, —C(═O)NH(CH₂)ₙS—, —C(═O)NH(C(R⁴)₂)ₙS—, —S(CH₂)ₙC(═O)NH—, —S(C(R⁴)₂)ₙC(═O)NH—, —C(═O)NH(CH₂)ₙNHC(═O)(CH₂)ₙ—, —C(═O)NH(C(R⁴)₂)ₙNHC(═O)(C(R⁴)₂)ₙ—, —C(═O)(CH₂)ₙ—, —C(═O)(C(R⁴)₂)ₙ—, —(CH₂)ₙC(═O)—, —(C(R⁴)₂)ₙC(═O)—, —(CH₂)ₙ(O(CH₂)ₙ)ₘNHC(═O)(CH₂)ₙ—, —(C(R⁴)₂)ₙ(O(C(R⁴)₂)ₙ)ₘNHC(═O)(C(R⁴)₂)ₙ—, —(CH₂)ₙNHC(═O)(CH₂)ₙ—, —(C(R⁴)₂)ₙNHC(═O)(C(R⁴)₂)ₙ—, —(CH₂)ₙNH((CH₂)ₙO)ₘ(CH₂)ₙ—, —(C(R⁴)₂)ₙNH((C(R⁴)₂)ₙO)ₘ(C(R⁴)₂)ₙ—, —(O(CH₂)ₙ)ₘNHC(═O)(CH₂)ₙ—, or —(O(C(R⁴)₂)ₙ)ₘNHC(═O)(C(R⁴)₂)ₙ—;
each X² is independently selected from a bond, [chemical structure] [chemical structure] [chemical structure]
—S—, —Si(OH)₂O—, [chemical structure]
—CHR⁴(CH₂)ₙC(═O)NH—, —CHR⁴(CH₂)ₙNHC(═O)—, —C(═O)NH— and —NHC(═O)—;
each R⁴ is independently selected from H, C₁₋₄alkyl, —C(═O)OH and —OH,
each R⁵ is independently selected from H, C₁₋₄alkyl, phenyl or C₁₋₄alkyl substituted with 1 to 3 —OH groups;
each R⁶ is independently selected from H, fluoro, benzyloxy substituted with —C(═O)OH, benzyl substituted with —C(═O)OH, C₁₋₄alkoxy substituted with —C(═O)OH and C₁₋₄alkyl substituted with —C(═O)OH;
R⁷ is independently selected from H, phenyl and pyridine;
R⁸ is independently selected from [chemical structure]
R⁹ is independently selected from H and C₁₋₆haloalkyl;
each n is independently selected from 1, 2, 3, 4, 5, 6, 7, 8 and 9,
each m is independently selected from 1, 2, 3, 4, 5, 6, 7, 8 and 9, and
TG is a drug moiety, an affinity probe, a chelator, a spectroscopic probe, a radioactive probe, an imaging reagent, a lipid molecule, a polyethylene glycol, a polymer, a nanoparticle, a quantum dot, a liposome, a PLGA particle, a polysaccharide, an acetyl group, or a surface.

58. The immunoconjugate of claim 57 wherein the conjugated serine is

[chemical structure]

59. The immunoconjugate of claim 58 wherein X₂ is [chemical structure]
or —(CH₂)C(═O)NH—.

The application's sequence listing, which the Patent Office published only in electronic form, follows.

SEQUENCE LISTING (1330 sequences)

SEQ ID NO: 1 - protein, 12 aa, Artificial Sequence
  source: /note="Description of Artificial Sequence: Synthetic peptide"
GDSLSWLLRLLN

SEQ ID NO: 2 - protein, 7 aa, Artificial Sequence
  source: /note="Description of Artificial Sequence: Synthetic peptide"
GDSLSWL

SEQ ID NO: 3 - protein, 12 aa, Artificial Sequence
  source: /note="Description of Artificial Sequence: Synthetic peptide"
GDSLSWLVRCLN

SEQ ID NO: 4 - protein, 12 aa, Artificial Sequence
  source: /note="Description of Artificial Sequence: Synthetic peptide"
GDSLSWLLRCLN

SEQ ID NO: 5 - protein, 12 aa, Artificial Sequence
  source: /note="Description of Artificial Sequence: Synthetic peptide"
GDSLSWLVRLLN

SEQ ID NO: 6 - protein, 12 aa, Artificial Sequence
  source: /note="Description of Artificial Sequence: Synthetic peptide"
GDSLSWLLRSLN

SEQ ID NO: 7 - protein, 17 aa, Artificial Sequence
  source: /note="Description of Artificial Sequence: Synthetic peptide"
GSQDVLDSLEFIASKLA

SEQ ID NO: 8 - protein, 13 aa, Artificial Sequence
  source: /note="Description of Artificial Sequence: Synthetic peptide"
VLDSLEFIASKLA

SEQ ID NO: 9 - protein, 11 aa, Artificial Sequence
  source: /note="Description of Artificial Sequence: Synthetic peptide"
DSLEFIASKLA

SEQ ID NO: 10 - protein, 12 aa, Artificial Sequence
  source: /note="Description of Artificial Sequence: Synthetic peptide"
GDSLDMLEWSLM

SEQ ID NO: 11 - protein, 11 aa, Artificial Sequence
  source: /note="Description of Artificial Sequence: Synthetic peptide"
GDSLDMLEWSL

SEQ ID NO: 12 - protein, 10 aa, Artificial Sequence
  source: /note="Description of Artificial Sequence: Synthetic peptide"
GDSLDMLEWS

SEQ ID NO: 13 - protein, 9 aa, Artificial Sequence
  source: /note="Description of Artificial Sequence: Synthetic peptide"
GDSLDMLEW

SEQ ID NO: 14 - protein, 8 aa, Artificial Sequence
  source: /note="Description of Artificial Sequence: Synthetic peptide"
DSLDMLEW

SEQ ID NO: 15 - protein, 6 aa, Artificial Sequence
  source: /note="Description of Artificial Sequence: Synthetic peptide"
GDSLDM

SEQ ID NO: 16 - protein, 12 aa, Artificial Sequence
  source: /note="Description of Artificial Sequence: Synthetic peptide"
LDSVRMMALAAR

SEQ ID NO: 17 - protein, 12 aa, Artificial Sequence
  source: /note="Description of Artificial Sequence: Synthetic peptide"
LDSLDMLEWSLR

SEQ ID NO: 18 - protein, 10 aa, Artificial Sequence
  source: /note="Description of Artificial Sequence: Synthetic peptide"
DSLEFIASKL

SEQ ID NO: 19 - protein, 9 aa, Artificial Sequence
  source: /note="Description of Artificial Sequence: Synthetic peptide"
DSLEFIASK

SEQ ID NO: 20 - protein, 9 aa, Artificial Sequence
  source: /note="Description of Artificial Sequence: Synthetic peptide"
DVLDSLEFI

SEQ ID NO: 21 - protein, 10 aa, Artificial Sequence
  source: /note="Description of Artificial Sequence: Synthetic peptide"
VLDSLEFIAS

SEQ ID NO: 22 - protein, 316 aa, Homo sapiens
  source: /note="PPTase (with N-terminal His6 tag after signal peptide cleavage)"
QPHHHHHHVFPAKRFCLVPSMEGVRWAFSCGTWLPSRAEWLLAVRSIQPEEKERIGQFVFARDAKAAMAGRLMIRKLVAEKLNIPWNHIRLQRTAKGKPVLAKDSSNPYPNFNFNISHQGDYAVLAAEPELQVGIDIMKTSFPGRGSIPEFFHIMKRKFTNKEWETIRSFKDEWTQLDMFYRNWALKESFIKAIGVGLGFELQRLEFDLSPLNLDIGQVYKETRLFLDGEEEKEWAFEESKIDEHHFVAVALRKPDGSRHQDVPSQDDSKPTQRQFTILNFNDLMSSAVPMTPEDPSFWDCFCFTEEIPIRNGTKS

SEQ ID NO: 23 - protein, 316 aa, Homo sapiens
  source: /note="PPTase (with C-terminal His6 tag after signal peptide cleavage)"
QPVFPAKRFCLVPSMEGVRWAFSCGTWLPSRAEWLLAVRSIQPEEKERIGQFVFARDAKAAMAGRLMIRKLVAEKLNIPWNHIRLQRTAKGKPVLAKDSSNPYPNFNFNISHQGDYAVLAAEPELQVGIDIMKTSFPGRGSIPEFFHIMKRKFTNKEWETIRSFKDEWTQLDMFYRNWALKESFIKAIGVGLGFELQRLEFDLSPLNLDIGQVYKETRLFLDGEEEKEWAFEESKIDEHHFVAVALRKPDGSRHQDVPSQDDSKPTQRQFTILNFNDLMSSAVPMTPEDPSFWDCFCFTEEIPIRNGTKSHHHHHH

SEQ ID NO: 24 - protein, 106 aa, Homo sapiens
  source: /note="Ig kappa light chain C region"
  VARIANT (45)..(45): /replace="Ala"
  VARIANT (83)..(83): /replace="Val"
  misc_feature (1)..(106): /note="Variant residues given in the sequence have no preference with respect to those in the annotations for variant positions"
TVAAPSVFIFPPSDEQLKSGTASVVCLLNNFYPREAKVQWKVDNVLQSGNSQESVTEQDSKDSTYSLSSTLTLSKADYEKHKLYACEVTHQGLSSPVTKSFNRGEC

SEQ ID NO: 25 - protein, 104 aa, Artificial Sequence
  source: /note="Description of Artificial Sequence: Synthetic mAb2-LC polypeptide"
PKAAPSVTLFPPSSEELQANKATLVCLISDFYPGAVTVAWKADSSPVKAGVETTTPSKQSNNKYAASSYLSLTPEQWKSHRSYSCQVTHEGSTVEKTVAPTECS

SEQ ID NO: 26 - protein, 226 aa, Artificial Sequence
  source: /note="Description of Artificial Sequence: Synthetic anti-hHER2-LC-I2-GDSLSWLLRLLN-Q3 polypeptide"
DIGDSLSWLLRLLNQMTQSPSSLSASVGDRVTITCRASQDVNTAVAWYQQKPGKAPKLLIYSASFLYSGVPSRFSGSRSGTDFTLTISSLQPEDFATYYCQQHYTTPPTFGQGTKVEIKRTVAAPSVFIFPPSDEQLKSGTASVVCLLNNFYPREAKVQWKVDNALQSGNSQESVTEQDSKDSTYSLSSTLTLSKADYEKHKVYACEVTHQGLSSPVTKSFNRGEC

SEQ ID NO: 27 - protein, 225 aa, Artificial Sequence
  source: /note="Description of Artificial Sequence: Synthetic anti-hHER2-LC-I2-DSLEFIASKLA-Q3 polypeptide"
DIDSLEFIASKLAQMTQSPSSLSASVGDRVTITCRASQDVNTAVAWYQQKPGKAPKLLIYSASFLYSGVPSRFSGSRSGTDFTLTISSLQPEDFATYYCQQHYTTPPTFGQGTKVEIKRTVAAPSVFIFPPSDEQLKSGTASVVCLLNNFYPREAKVQWKVDNALQSGNSQESVTEQDSKDSTYSLSSTLTLSKADYEKHKVYACEVTHQGLSSPVTKSFNRGEC

SEQ ID NO: 28 - protein, 118 aa, Artificial Sequence
  source: /note="Description of Artificial Sequence: Synthetic anti-hHER2-LC-C214-GDSLSWLLRLLN polypeptide"
TVAAPSVFIFPPSDEQLKSGTASVVCLLNNFYPREAKVQWKVDNALQSGNSQESVTEQDSKDSTYSLSSTLTLSKADYEKHKVYACEVTHQGLSSPVTKSFNRGECGDSLSWLLRLLN

SEQ ID NO: 29 - protein, 117 aa, Artificial Sequence
  source: /note="Description of Artificial Sequence: Synthetic anti-hHER2-LC-C214-DSLEFIASKLA polypeptide"
TVAAPSVFIFPPSDEQLKSGTASVVCLLNNFYPREAKVQWKVDNALQSGNSQESVTEQDSKDSTYSLSSTLTLSKADYEKHKVYACEVTHQGLSSPVTKSFNRGECDSLEFIASKLA

SEQ ID NO: 30 - protein, 222 aa, Artificial Sequence
  source: /note="Description of Artificial Sequence: Synthetic anti-hHER2-LC-S76D-S77-L78-EFIASKLA-Q79 polypeptide"
DIQMTQSPSSLSASVGDRVTITCRASQDVNTAVAWYQQKPGKAPKLLIYSASFLYSGVPSRFSGSRSGTDFTLTIDSLEFIASKLAQPEDFATYYCQQHYTTPPTFGQGTKVEIKRTVAAPSVFIFPPSDEQLKSGTASVVCLLNNFYPREAKVQWKVDNALQSGNSQESVTEQDSKDSTYSLSSTLTLSKADYEKHKVYACEVTHQGLSSPVTKSFNRGEC

SEQ ID NO: 31 - protein, 118 aa, Artificial Sequence
  source: /note="Description of Artificial Sequence: Synthetic anti-hHER2-LC-T109-GDSLSWLLRLLN-V110 polypeptide"
TGDSLSWLLRLLNVAAPSVFIFPPSDEQLKSGTASVVCLLNNFYPREAKVQWKVDNALQSGNSQESVTEQDSKDSTYSLSSTLTLSKADYEKHKVYACEVTHQGLSSPVTKSFNRGEC

SEQ ID NO: 32 - protein, 118 aa, Artificial Sequence
  source: /note="Description of Artificial Sequence: Synthetic anti-hHER2-LC-V110-GDSLSWLLRLLN-A111 polypeptide"
TVGDSLSWLLRLLNAAPSVFIFPPSDEQLKSGTASVVCLLNNFYPREAKVQWKVDNALQSGNSQESVTEQDSKDSTYSLSSTLTLSKADYEKHKVYACEVTHQGLSSPVTKSFNRGEC

SEQ ID NO: 33 - protein, 118 aa, Artificial Sequence
  source: /note="Description of Artificial Sequence: Synthetic anti-hHER2-LC-A111-GDSLSWLLRLLN-A112 polypeptide"
TVAGDSLSWLLRLLNAPSVFIFPPSDEQLKSGTASVVCLLNNFYPREAKVQWKVDNALQSGNSQESVTEQDSKDSTYSLSSTLTLSKADYEKHKVYACEVTHQGLSSPVTKSFNRGEC

SEQ ID NO: 34 - protein, 118 aa, Artificial Sequence
  source: /note="Description of Artificial Sequence: Synthetic anti-hHER2-LC-P119-GDSLSWLLRLLN-P120 polypeptide"
TVAAPSVFIFPGDSLSWLLRLLNPSDEQLKSGTASVVCLLNNFYPREAKVQWKVDNALQSGNSQESVTEQDSKDSTYSLSSTLTLSKADYEKHKVYACEVTHQGLSSPVTKSFNRGEC

SEQ ID NO: 35 - protein, 118 aa, Artificial Sequence
  source: /note="Description of Artificial Sequence: Synthetic anti-hHER2-LC-P120-GDSLSWLLRLLN-S121 polypeptide"
TVAAPSVFIFPPGDSLSWLLRLLNSDEQLKSGTASVVCLLNNFYPREAKVQWKVDNALQSGNSQESVTEQDSKDSTYSLSSTLTLSKADYEKHKVYACEVTHQGLSSPVTKSFNRGEC

SEQ ID NO: 36 - protein, 118 aa, Artificial Sequence
  source: /note="Description of Artificial Sequence: Synthetic anti-hHER2-LC-S121-GDSLSWLLRLLN-D122 polypeptide"
TVAAPSVFIFPPSGDSLSWLLRLLNDEQLKSGTASVVCLLNNFYPREAKVQWKVDNALQSGNSQESVTEQDSKDSTYSLSSTLTLSKADYEKHKVYACEVTHQGLSSPVTKSFNRGEC

SEQ ID NO: 37 - protein, 118 aa, Artificial Sequence
  source: /note="Description of Artificial Sequence: Synthetic anti-hHER2-LC-D122-GDSLSWLLRLLN-E123 polypeptide"
TVAAPSVFIFPPSDGDSLSWLLRLLNEQLKSGTASVVCLLNNFYPREAKVQWKVDNALQSGNSQESVTEQDSKDSTYSLSSTLTLSKADYEKHKVYACEVTHQGLSSPVTKSFNRGEC

SEQ ID NO: 38 - protein, 118 aa, Artificial Sequence
  source: /note="Description of Artificial Sequence: Synthetic anti-hHER2-LC-Y140-GDSLSWLLRLLN-P141 polypeptide"
TVAAPSVFIFPPSDEQLKSGTASVVCLLNNFYGDSLSWLLRLLNPREAKVQWKVDNALQSGNSQESVTEQDSKDSTYSLSSTLTLSKADYEKHKVYACEVTHQGLSSPVTKSFNRGEC

SEQ ID NO: 39 - protein, 118 aa, Artificial Sequence
  source: /note="Description of Artificial Sequence: Synthetic anti-hHER2-LC-P141-GDSLSWLLRLLN-R142 polypeptide"
TVAAPSVFIFPPSDEQLKSGTASVVCLLNNFYPGDSLSWLLRLLNREAKVQWKVDNALQSGNSQESVTEQDSKDSTYSLSSTLTLSKADYEKHKVYACEVTHQGLSSPVTKSFNRGEC

SEQ ID NO: 40 - protein, 118 aa, Artificial Sequence
  source: /note="Description of Artificial Sequence: Synthetic anti-hHER2-LC-R142-GDSLSWLLRLLN-E143 polypeptide"
TVAAPSVFIFPPSDEQLKSGTASVVCLLNNFYPRGDSLSWLLRLLNEAKVQWKVDNALQSGNSQESVTEQDSKDSTYSLSSTLTLSKADYEKHKVYACEVTHQGLSSPVTKSFNRGEC

SEQ ID NO: 41 - protein, 118 aa, Artificial Sequence
  source: /note="Description of Artificial Sequence: Synthetic anti-hHER2-LC-E143-GDSLSWLLRLLN-A144 polypeptide"
TVAAPSVFIFPPSDEQLKSGTASVVCLLNNFYPREGDSLSWLLRLLNAKVQWKVDNALQSGNSQESVTEQDSKDSTYSLSSTLTLSKADYEKHKVYACEVTHQGLSSPVTKSFNRGEC

SEQ ID NO: 42 - protein, 118 aa, Artificial Sequence
  source: /note="Description of Artificial Sequence: Synthetic anti-hHER2-LC-D151-GDSLSWLLRLLN-N152 polypeptide"
TVAAPSVFIFPPSDEQLKSGTASVVCLLNNFYPREAKVQWKVDGDSLSWLLRLLNNALQSGNSQESVTEQDSKDSTYSLSSTLTLSKADYEKHKVYACEVTHQGLSSPVTKSFNRGEC

SEQ ID NO: 43 - protein, 118 aa, Artificial Sequence
  source: /note="Description of Artificial Sequence: Synthetic anti-hHER2-LC-N152-GDSLSWLLRLLN-A153 polypeptide"
TVAAPSVFIFPPSDEQLKSGTASVVCLLNNFYPREAKVQWKVDNGDSLSWLLRLLNALQSGNSQESVTEQDSKDSTYSLSSTLTLSKADYEKHKVYACEVTHQGLSSPVTKSFNRGEC

SEQ ID NO: 44 - protein, 118 aa, Artificial Sequence
  source: /note="Description of Artificial Sequence: Synthetic anti-hHER2-LC-A153-GDSLSWLLRLLN-L154 polypeptide"
TVAAPSVFIFPPSDEQLKSGTASVVCLLNNFYPREAKVQWKVDNAGDSLSWLLRLLNLQSGNSQESVTEQDSKDSTYSLSSTLTLSKADYEKHKVYACEVTHQGLSSPVTKSFNRGEC

SEQ ID NO: 45 - protein, 118 aa, Artificial Sequence
  source: /note="Description of Artificial Sequence: Synthetic anti-hHER2-LC-L154-GDSLSWLLRLLN-Q155 polypeptide"
TVAAPSVFIFPPSDEQLKSGTASVVCLLNNFYPREAKVQWKVDNALGDSLSWLLRLLNQSGNSQESVTEQDSKDSTYSLSSTLTLSKADYEKHKVYACEVTHQGLSSPVTKSFNRGEC

SEQ ID NO: 46 - protein, 118 aa, Artificial Sequence
  source: /note="Description of Artificial Sequence: Synthetic anti-hHER2-LC-Q155-GDSLSWLLRLLN-S156 polypeptide"
TVAAPSVFIFPPSDEQLKSGTASVVCLLNNFYPREAKVQWKVDNALQGDSLSWLLRLLNSGNSQESVTEQDSKDSTYSLSSTLTLSKADYEKHKVYACEVTHQGLSSPVTKSFNRGEC

SEQ ID NO: 47 - protein, 118 aa, Artificial Sequence
  source: /note="Description of Artificial Sequence: Synthetic anti-hHER2-LC-E161-GDSLSWLLRLLN-S162 polypeptide"
TVAAPSVFIFPPSDEQLKSGTASVVCLLNNFYPREAKVQWKVDNALQSGNSQEGDSLSWLLRLLNSVTEQDSKDSTYSLSSTLTLSKADYEKHKVYACEVTHQGLSSPVTKSFNRGEC

SEQ ID NO: 48 - protein, 118 aa, Artificial Sequence
  source: /note="Description of Artificial Sequence: Synthetic anti-hHER2-LC-S162-GDSLSWLLRLLN-V163 polypeptide"
TVAAPSVFIFPPSDEQLKSGTASVVCLLNNFYPREAKVQWKVDNALQSGNSQESGDSLSWLLRLLNVTEQDSKDSTYSLSSTLTLSKADYEKHKVYACEVTHQGLSSPVTKSFNRGEC

SEQ ID NO: 49 - protein, 118 aa, Artificial Sequence
  source: /note="Description of Artificial Sequence: Synthetic anti-hHER2-LC-V163-GDSLSWLLRLLN-T164 polypeptide"
TVAAPSVFIFPPSDEQLKSGTASVVCLLNNFYPREAKVQWKVDNALQSGNSQESVGDSLSWLLRLLNTEQDSKDSTYSLSSTLTLSKADYEKHKVYACEVTHQGLSSPVTKSFNRGEC

SEQ ID NO: 50 - protein, 118 aa, Artificial Sequence
  source: /note="Description of Artificial Sequence: Synthetic anti-hHER2-LC-T164-GDSLSWLLRLLN-E165 polypeptide"
TVAAPSVFIFPPSDEQLKSGTASVVCLLNNFYPREAKVQWKVDNALQSGNSQESVTGDSLSWLLRLLNEQDSKDSTYSLSSTLTLSKADYEKHKVYACEVTHQGLSSPVTKSFNRGEC

SEQ ID NO: 51 - protein, 118 aa, Artificial Sequence
  source: /note="Description of Artificial Sequence: Synthetic anti-hHER2-LC-E165-GDSLSWLLRLLN-Q166 polypeptide"
TVAAPSVFIFPPSDEQLKSGTASVVCLLNNFYPREAKVQWKVDNALQSGNSQESVTEGDSLSWLLRLLNQDSKDSTYSLSSTLTLSKADYEKHKVYACEVTHQGLSSPVTKSFNRGEC

SEQ ID NO: 52 - protein, 118 aa, Artificial Sequence
  source: /note="Description of Artificial Sequence: Synthetic anti-hHER2-LC-Q166-GDSLSWLLRLLN-D167 polypeptide"
TVAAPSVFIFPPSDEQLKSGTASVVCLLNNFYPREAKVQWKVDNALQSGNSQESVTEQGDSLSWLLRLLNDSKDSTYSLSSTLTLSKADYEKHKVYACEVTHQGLSSPVTKSFNRGEC

SEQ ID NO: 53 - protein, 118 aa, Artificial Sequence
  source: /note="Description of Artificial Sequence: Synthetic anti-hHER2-LC-D167-GDSLSWLLRLLN-S168 polypeptide"
TVAAPSVFIFPPSDEQLKSGTASVVCLLNNFYPREAKVQWKVDNALQSGNSQESVTEQDGDSLSWLLRLLNSKDSTYSLSSTLTLSKADYEKHKVYACEVTHQGLSSPVTKSFNRGEC

SEQ ID NO: 54 - protein, 118 aa, Artificial Sequence
  source: /note="Description of Artificial Sequence: Synthetic anti-hHER2-LC-T197-GDSLSWLLRLLN-H198 polypeptide"
TVAAPSVFIFPPSDEQLKSGTASVVCLLNNFYPREAKVQWKVDNALQSGNSQESVTEQDSKDSTYSLSSTLTLSKADYEKHKVYACEVTGDSLSWLLRLLNHQGLSSPVTKSFNRGEC

SEQ ID NO: 55 - protein, 118 aa, Artificial Sequence
  source: /note="Description of Artificial Sequence: Synthetic anti-hHER2-LC-H198-GDSLSWLLRLLN-Q199 polypeptide"
TVAAPSVFIFPPSDEQLKSGTASVVCLLNNFYPREAKVQWKVDNALQSGNSQESVTEQDSKDSTYSLSSTLTLSKADYEKHKVYACEVTHGDSLSWLLRLLNQGLSSPVTKSFNRGEC

SEQ ID NO: 56 - protein, 118 aa, Artificial Sequence
  source: /note="Description of Artificial Sequence: Synthetic anti-hHER2-LC-Q199-GDSLSWLLRLLN-G200 polypeptide"
TVAAPSVFIFPPSDEQLKSGTASVVCLLNNFYPREAKVQWKVDNALQSGNSQESVTEQDSKDSTYSLSSTLTLSKADYEKHKVYACEVTHQGDSLSWLLRLLNGLSSPVTKSFNRGEC

SEQ ID NO: 57 - protein, 118 aa, Artificial Sequence
  source: /note="Description of Artificial Sequence: Synthetic anti-hHER2-LC-G200-GDSLSWLLRLLN-L201 polypeptide"
TVAAPSVFIFPPSDEQLKSGTASVVCLLNNFYPREAKVQWKVDNALQSGNSQESVTEQDSKDSTYSLSSTLTLSKADYEKHKVYACEVTHQGGDSLSWLLRLLNLSSPVTKSFNRGEC

SEQ ID NO: 58 - protein, 118 aa, Artificial Sequence
  source: /note="Description of Artificial Sequence: Synthetic anti-hHER2-LC-L201-GDSLSWLLRLLN-S202 polypeptide"
TVAAPSVFIFPPSDEQLKSGTASVVCLLNNFYPREAKVQWKVDNALQSGNSQESVTEQDSKDSTYSLSSTLTLSKADYEKHKVYACEVTHQGLGDSLSWLLRLLNSSPVTKSFNRGEC

SEQ ID NO: 59 - protein, 118 aa, Artificial Sequence
  source: /note="Description of Artificial Sequence: Synthetic anti-hHER2-LC-S202-GDSLSWLLRLLN-S203 polypeptide"
TVAAPSVFIFPPSDEQLKSGTASVVCLLNNFYPREAKVQWKVDNALQSGNSQESVTEQDSKDSTYSLSSTLTLSKADYEKHKVYACEVTHQGLSGDSLSWLLRLLNSPVTKSFNRGEC

SEQ ID NO: 60 - protein, 118 aa, Artificial Sequence
  source: /note="Description of Artificial Sequence: Synthetic anti-hHER2-LC-S203-GDSLSWLLRLLN-P204 polypeptide"
TVAAPSVFIFPPSDEQLKSGTASVVCLLNNFYPREAKVQWKVDNALQSGNSQESVTEQDSKDSTYSLSSTLTLSKADYEKHKVYACEVTHQGLSSGDSLSWLLRLLNPVTKSFNRGEC

SEQ ID NO: 61 - protein, 118 aa, Artificial Sequence
  source: /note="Description of Artificial Sequence: Synthetic anti-hHER2-LC-K207-GDSLSWLLRLLN-S208 polypeptide"
TVAAPSVFIFPPSDEQLKSGTASVVCLLNNFYPREAKVQWKVDNALQSGNSQESVTEQDSKDSTYSLSSTLTLSKADYEKHKVYACEVTHQGLSSPVTKGDSLSWLLRLLNSFNRGEC

SEQ ID NO: 62 - protein, 117 aa, Artificial Sequence
  source: /note="Description of Artificial Sequence: Synthetic anti-hHER2-LC-T109-DSLEFIASKLA-V110 polypeptide"
TDSLEFIASKLAVAAPSVFIFPPSDEQLKSGTASVVCLLNNFYPREAKVQWKVDNALQSGNSQESVTEQDSKDSTYSLSSTLTLSKADYEKHKVYACEVTHQGLSSPVTKSFNRGEC

SEQ ID NO: 63 - protein, 117 aa, Artificial Sequence
  source: /note="Description of Artificial Sequence: Synthetic anti-hHER2-LC-V110-DSLEFIASKLA-A111 polypeptide"
TVDSLEFIASKLAAAPSVFIFPPSDEQLKSGTASVVCLLNNFYPREAKVQWKVDNALQSGNSQESVTEQDSKDSTYSLSSTLTLSKADYEKHKVYACEVTHQGLSSPVTKSFNRGEC

SEQ ID NO: 64 - protein, 117 aa, Artificial Sequence
  source: /note="Description of Artificial Sequence: Synthetic anti-hHER2-LC-A111-DSLEFIASKLA-A112 polypeptide"
TVADSLEFIASKLAAPSVFIFPPSDEQLKSGTASVVCLLNNFYPREAKVQWKVDNALQSGNSQESVTEQDSKDSTYSLSSTLTLSKADYEKHKVYACEVTHQGLSSPVTKSFNRGEC

SEQ ID NO: 65 - protein, 117 aa, Artificial Sequence
  source: /note="Description of Artificial Sequence: Synthetic anti-hHER2-LC-P119-DSLEFIASKLA-P120 polypeptide"
TVAAPSVFIFPDSLEFIASKLAPSDEQLKSGTASVVCLLNNFYPREAKVQWKVDNALQSGNSQESVTEQDSKDSTYSLSSTLTLSKADYEKHKVYACEVTHQGLSSPVTKSFNRGEC

SEQ ID NO: 66 - protein, 117 aa, Artificial Sequence
  source: /note="Description of Artificial Sequence: Synthetic anti-hHER2-LC-P120-DSLEFIASKLA-S121 polypeptide"
TVAAPSVFIFPPDSLEFIASKLASDEQLKSGTASVVCLLNNFYPREAKVQWKVDNALQSGNSQESVTEQDSKDSTYSLSSTLTLSKADYEKHKVYACEVTHQGLSSPVTKSFNRGEC

SEQ ID NO: 67 - protein, 117 aa, Artificial Sequence
  source: /note="Description of Artificial Sequence: Synthetic anti-hHER2-LC-S121-DSLEFIASKLA-D122 polypeptide"
TVAAPSVFIFPPSDSLEFIASKLADEQLKSGTASVVCLLNNFYPREAKVQWKVDNALQSGNSQESVTEQDSKDSTYSLSSTLTLSKADYEKHKVYACEVTHQGLSSPVTKSFNRGEC

SEQ ID NO: 68 - protein, 117 aa, Artificial Sequence
  source: /note="Description of Artificial Sequence: Synthetic anti-hHER2-LC-D122-DSLEFIASKLA-E123 polypeptide"
TVAAPSVFIFPPSDDSLEFIASKLAEQLKSGTASVVCLLNNFYPREAKVQWKVDNALQSGNSQESVTEQDSKDSTYSLSSTLTLSKADYEKHKVYACEVTHQGLSSPVTKSFNRGEC

SEQ ID NO: 69 - protein, 117 aa, Artificial Sequence
  source: /note="Description of Artificial Sequence: Synthetic anti-hHER2-LC-Y140-DSLEFIASKLA-P141 polypeptide"
TVAAPSVFIFPPSDEQLKSGTASVVCLLNNFYDSLEFIASKLAPREAKVQWKVDNALQSGNSQESVTEQDSKDSTYSLSSTLTLSKADYEKHKVYACEVTHQGLSSPVTKSFNRGEC

SEQ ID NO: 70 - protein, 117 aa, Artificial Sequence
  source: /note="Description of Artificial Sequence: Synthetic anti-hHER2-LC-P141-DSLEFIASKLA-R142 polypeptide"
TVAAPSVFIFPPSDEQLKSGTASVVCLLNNFYPDSLEFIASKLAREAKVQWKVDNALQSGNSQESVTEQDSKDSTYSLSSTLTLSKADYEKHKVYACEVTHQGLSSPVTKSFNRGEC

SEQ ID NO: 71 - protein, 117 aa, Artificial Sequence
  source: /note="Description of Artificial Sequence: Synthetic anti-hHER2-LC-R142-DSLEFIASKLA-E143 polypeptide"
TVAAPSVFIFPPSDEQLKSGTASVVCLLNNFYPRDSLEFIASKLAEAKVQWKVDNALQSGNSQESVTEQDSKDSTYSLSSTLTLSKADYEKHKVYACEVTHQGLSSPVTKSFNRGEC

SEQ ID NO: 72 - protein, 117 aa, Artificial Sequence
  source: /note="Description of Artificial Sequence: Synthetic anti-hHER2-LC-E143-DSLEFIASKLA-A144 polypeptide"
TVAAPSVFIFPPSDEQLKSGTASVVCLLNNFYPREDSLEFIASKLAAKVQWKVDNALQSGNSQESVTEQDSKDSTYSLSSTLTLSKADYEKHKVYACEVTHQGLSSPVTKSFNRGEC

SEQ ID NO: 73 - protein, 117 aa, Artificial Sequence
  source: /note="Description of Artificial Sequence: Synthetic anti-hHER2-LC-D151-DSLEFIASKLA-N152 polypeptide"
TVAAPSVFIFPPSDEQLKSGTASVVCLLNNFYPREAKVQWKVDDSLEFIASKLANALQSGNSQESVTEQDSKDSTYSLSSTLTLSKADYEKHKVYACEVTHQGLSSPVTKSFNRGEC

SEQ ID NO: 74 - protein, 117 aa, Artificial Sequence
  source: /note="Description of Artificial Sequence: Synthetic anti-hHER2-LC-N152-DSLEFIASKLA-A153 polypeptide"
TVAAPSVFIFPPSDEQLKSGTASVVCLLNNFYPREAKVQWKVDNDSLEFIASKLAALQSGNSQESVTEQDSKDSTYSLSSTLTLSKADYEKHKVYACEVTHQGLSSPVTKSFNRGEC

SEQ ID NO: 75 - protein, 117 aa, Artificial Sequence
  source: /note="Description of Artificial Sequence: Synthetic anti-hHER2-LC-A153-DSLEFIASKLA-L154 polypeptide"
TVAAPSVFIFPPSDEQLKSGTASVVCLLNNFYPREAKVQWKVDNADSLEFIASKLALQSGNSQESVTEQDSKDSTYSLSSTLTLSKADYEKHKVYACEVTHQGLSSPVTKSFNRGEC

SEQ ID NO: 76 - protein, 117 aa, Artificial Sequence
  source: /note="Description of Artificial Sequence: Synthetic anti-hHER2-LC-L154-DSLEFIASKLA-Q155 polypeptide"
TVAAPSVFIFPPSDEQLKSGTASVVCLLNNFYPREAKVQWKVDNALDSLEFIASKLAQSGNSQESVTEQDSKDSTYSLSSTLTLSKADYEKHKVYACEVTHQGLSSPVTKSFNRGEC

SEQ ID NO: 77 - protein, 117 aa, Artificial Sequence
  source: /note="Description of Artificial Sequence: Synthetic anti-hHER2-LC-Q155-DSLEFIASKLA-S156 polypeptide"
TVAAPSVFIFPPSDEQLKSGTASVVCLLNNFYPREAKVQWKVDNALQDSLEFIASKLASGNSQESVTEQDSKDSTYSLSSTLTLSKADYEKHKVYACEVTHQGLSSPVTKSFNRGEC

SEQ ID NO: 78 - protein, 117 aa, Artificial Sequence
  source: /note="Description of Artificial Sequence: Synthetic anti-hHER2-LC-E161-DSLEFIASKLA-S162 polypeptide"
TVAAPSVFIFPPSDEQLKSGTASVVCLLNNFYPREAKVQWKVDNALQSGNSQEDSLEFIASKLASVTEQDSKDSTYSLSSTLTLSKADYEKHKVYACEVTHQGLSSPVTKSFNRGEC

SEQ ID NO: 79 - protein, 117 aa, Artificial Sequence
  source: /note="Description of Artificial Sequence: Synthetic anti-hHER2-LC-S162-DSLEFIASKLA-V163 polypeptide"
TVAAPSVFIFPPSDEQLKSGTASVVCLLNNFYPREAKVQWKVDNALQSGNSQESDSLEFIASKLAVTEQDSKDSTYSLSSTLTLSKADYEKHKVYACEVTHQGLSSPVTKSFNRGEC

SEQ ID NO: 80 - protein, 117 aa, Artificial Sequence
  source: /note="Description of Artificial Sequence: Synthetic anti-hHER2-LC-V163-DSLEFIASKLA-T164 polypeptide"
TVAAPSVFIFPPSDEQLKSGTASVVCLLNNFYPREAKVQWKVDNALQSGNSQESVDSLEFIASKLATEQDSKDSTYSLSSTLTLSKADYEKHKVYACEVTHQGLSSPVTKSFNRGEC

SEQ ID NO: 81 - protein, 117 aa, Artificial Sequence
  source: /note="Description of Artificial Sequence: Synthetic anti-hHER2-LC-T164-DSLEFIASKLA-E165 polypeptide"
TVAAPSVFIFPPSDEQLKSGTASVVCLLNNFYPREAKVQWKVDNALQSGNSQESVTDSLEFIASKLAEQDSKDSTYSLSSTLTLSKADYEKHKVYACEVTHQGLSSPVTKSFNRGEC

SEQ ID NO: 82 - protein, 117 aa, Artificial Sequence
  source: /note="Description of Artificial Sequence: Synthetic anti-hHER2-LC-E165-DSLEFIASKLA-Q166 polypeptide"
TVAAPSVFIFPPSDEQLKSGTASVVCLLNNFYPREAKVQWKVDNALQSGNSQESVTEDSLEFIASKLAQDSKDSTYSLSSTLTLSKADYEKHKVYACEVTHQGLSSPVTKSFNRGEC

SEQ ID NO: 83 - protein, 117 aa, Artificial Sequence
  source: /note="Description of Artificial Sequence: Synthetic anti-hHER2-LC-Q166-DSLEFIASKLA-D167 polypeptide"
TVAAPSVFIFPPSDEQLKSGTASVVCLLNNFYPREAKVQWKVDNALQSGNSQESVTEQDSLEFIASKLADSKDSTYSLSSTLTLSKADYEKHKVYACEVTHQGLSSPVTKSFNRGEC

SEQ ID NO: 84 - protein, 117 aa, Artificial Sequence
  source: /note="Description of Artificial Sequence: Synthetic anti-hHER2-LC-D167-DSLEFIASKLA-S168 polypeptide"
TVAAPSVFIFPPSDEQLKSGTASVVCLLNNFYPREAKVQWKVDNALQSGNSQESVTEQDDSLEFIASKLASKDSTYSLSSTLTLSKADYEKHKVYACEVTHQGLSSPVTKSFNRGEC

SEQ ID NO: 85 - protein, 117 aa, Artificial Sequence
  source: /note="Description of Artificial Sequence: Synthetic anti-hHER2-LC-T197-DSLEFIASKLA-H198 polypeptide"
TVAAPSVFIFPPSDEQLKSGTASVVCLLNNFYPREAKVQWKVDNALQSGNSQESVTEQDSKDSTYSLSSTLTLSKADYEKHKVYACEVTDSLEFIASKLAHQGLSSPVTKSFNRGEC

SEQ ID NO: 86 - protein, 117 aa, Artificial Sequence
  source: /note="Description of Artificial Sequence: Synthetic anti-hHER2-LC-H198-DSLEFIASKLA-Q199 polypeptide"
TVAAPSVFIFPPSDEQLKSGTASVVCLLNNFYPREAKVQWKVDNALQSGNSQESVTEQDSKDSTYSLSSTLTLSKADYEKHKVYACEVTHDSLEFIASKLAQGLSSPVTKSFNRGEC

SEQ ID NO: 87 - protein, 117 aa, Artificial Sequence
  source: /note="Description of Artificial Sequence: Synthetic anti-hHER2-LC-Q199-DSLEFIASKLA-G200 polypeptide"
TVAAPSVFIFPPSDEQLKSGTASVVCLLNNFYPREAKVQWKVDNALQSGNSQESVTEQDSKDSTYSLSSTLTLSKADYEKHKVYACEVTHQDSLEFIASKLAGLSSPVTKSFNRGEC

SEQ ID NO: 88 - protein, 117 aa, Artificial Sequence
  source: /note="Description of Artificial Sequence: Synthetic anti-hHER2-LC-G200-DSLEFIASKLA-L201 polypeptide"
TVAAPSVFIFPPSDEQLKSGTASVVCLLNNFYPREAKVQWKVDNALQSGNSQESVTEQDSKDSTYSLSSTLTLSKADYEKHKVYACEVTHQGDSLEFIASKLALSSPVTKSFNRGEC

SEQ ID NO: 89 - protein, 117 aa, Artificial Sequence
  source: /note="Description of Artificial Sequence: Synthetic anti-hHER2-LC-L201-DSLEFIASKLA-S202 polypeptide"
TVAAPSVFIFPPSDEQLKSGTASVVCLLNNFYPREAKVQWKVDNALQSGNSQESVTEQDSKDSTYSLSSTLTLSKADYEKHKVYACEVTHQGLDSLEFIASKLASSPVTKSFNRGEC

SEQ ID NO: 90 - protein, 117 aa, Artificial Sequence
  source: /note="Description of Artificial Sequence: Synthetic anti-hHER2-LC-S202-DSLEFIASKLA-S203 polypeptide"
TVAAPSVFIFPPSDEQLKSGTASVVCLLNNFYPREAKVQWKVDNALQSGNSQESVTEQDSKDSTYSLSSTLTLSKADYEKHKVYACEVTHQGLSDSLEFIASKLASPVTKSFNRGEC

SEQ ID NO: 91 - protein, 117 aa, Artificial Sequence
  source: /note="Description of Artificial Sequence: Synthetic anti-hHER2-LC-S203-DSLEFIASKLA-P204 polypeptide"
TVAAPSVFIFPPSDEQLKSGTASVVCLLNNFYPREAKVQWKVDNALQSGNSQESVTEQDSKDSTYSLSSTLTLSKADYEKHKVYACEVTHQGLSSDSLEFIASKLAPVTKSFNRGEC

SEQ ID NO: 92 - protein, 117 aa, Artificial Sequence
  source: /note="Description of Artificial Sequence: Synthetic anti-hHER2-LC-K207-DSLEFIASKLA-S208 polypeptide"
TVAAPSVFIFPPSDEQLKSGTASVVCLLNNFYPREAKVQWKVDNALQSGNSQESVTEQDSKDSTYSLSSTLTLSKADYEKHKVYACEVTHQGLSSPVTKDSLEFIASKLASFNRGEC

SEQ ID NO: 93 - protein, 328 aa, Homo sapiens
  source: /note="Ig gamma-1 heavy chain C region"
  VARIANT (96)..(96): /replace="Lys"
  VARIANT (238)..(238): /replace="Glu"
  VARIANT (240)..(240): /replace="Met"
  VARIANT (313)..(313): /replace="Gly"
  misc_feature (1)..(328): /note="Variant residues given in the sequence have no preference with respect to those in the annotations for variant positions"
STKGPSVFPLAPSSKSTSGGTAALGCLVKDYFPEPVTVSWNSGALTSGVHTFPAVLQSSGLYSLSSVVTVPSSSLGTQTYICNVNHKPSNTKVDKRVEPKSCDKTHTCPPCPAPELLGGPSVFLFPPKPKDTLMISRTPEVTCVVVDVSHEDPEVKFNWYVDGVEVHNAKTKPREEQYNSTYRVVSVLTVLHQDWLNGKEYKCKVSNKALPAPIEKTISKAKGQPREPQVYTLPPSRDELTKNQVSLTCLVKGFYPSDIAVEWESNGQPENNYKTTPPVLDSDGSFFLYSKLTVDKSRWQQGNVFSCSVMHEALHNHYTQKSLSLSPG

SEQ ID NO: 94 - protein, 461 aa, Artificial Sequence
  source: /note="Description of Artificial Sequence: Synthetic anti-hHER2-HC-V2-GDSLSWLLRLLN-Q3 polypeptide"
EVGDSLSWLLRLLNQLVESGGGLVQPGGSLRLSCAASGFNIKDTYIHWVRQAPGKGLEWVARIYPTNGYTRYADSVKGRFTISADTSKNTAYLQMNSLRAEDTAVYYCSRWGGDGFYAMDYWGQGTLVTVSSASTKGPSVFPLAPSSKSTSGGTAALGCLVKDYFPEPVTVSWNSGALTSGVHTFPAVLQSSGLYSLSSVVTVPSSSLGTQTYICNVNHKPSNTKVDKKVEPKSCDKTHTCPPCPAPELLGGPSVFLFPPKPKDTLMISRTPEVTCVVVDVSHEDPEVKFNWYVDGVEVHNAKTKPREEQYNSTYRVVSVLTVLHQDWLNGKEYKCKVSNKALPAPIEKTISKAKGQPREPQVYTLPPSREEMTKNQVSLTCLVKGFYPSDIAVEWESNGQPENNYKTTPPVLDSDGSFFLYSKLTVDKSRWQQGNVFSCSVMHEALHNHYTQKSLSLSPG

SEQ ID NO: 95 - protein, 460 aa, Artificial Sequence
  source: /note="Description of Artificial Sequence: Synthetic anti-hHER2-HC-V2-DSLEFIASKLA-Q3 polypeptide"
EVDSLEFIASKLAQLVESGGGLVQPGGSLRLSCAASGFNIKDTYIHWVRQAPGKGLEWVARIYPTNGYTRYADSVKGRFTISADTSKNTAYLQMNSLRAEDTAVYYCSRWGGDGFYAMDYWGQGTLVTVSSASTKGPSVFPLAPSSKSTSGGTAALGCLVKDYFPEPVTVSWNSGALTSGVHTFPAVLQSSGLYSLSSVVTVPSSSLGTQTYICNVNHKPSNTKVDKKVEPKSCDKTHTCPPCPAPELLGGPSVFLFPPKPKDTLMISRTPEVTCVVVDVSHEDPEVKFNWYVDGVEVHNAKTKPREEQYNSTYRVVSVLTVLHQDWLNGKEYKCKVSNKALPAPIEKTISKAKGQPREPQVYTLPPSREEMTKNQVSLTCLVKGFYPSDIAVEWESNGQPENNYKTTPPVLDSDGSFFLYSKLTVDKSRWQQGNVFSCSVMHEALHNHYTQKSLSLSPG

SEQ ID NO: 96 - protein, 461 aa, Artificial Sequence
  source: /note="Description of Artificial Sequence: Synthetic anti-hHER2-HC-V2-GDSLDMLEWSLM-Q3 polypeptide"
EVGDSLDMLEWSLMQLVESGGGLVQPGGSLRLSCAASGFNIKDTYIHWVRQAPGKGLEWVARIYPTNGYTRYADSVKGRFTISADTSKNTAYLQMNSLRAEDTAVYYCSRWGGDGFYAMDYWGQGTLVTVSSASTKGPSVFPLAPSSKSTSGGTAALGCLVKDYFPEPVTVSWNSGALTSGVHTFPAVLQSSGLYSLSSVVTVPSSSLGTQTYICNVNHKPSNTKVDKKVEPKSCDKTHTCPPCPAPELLGGPSVFLFPPKPKDTLMISRTPEVTCVVVDVSHEDPEVKFNWYVDGVEVHNAKTKPREEQYNSTYRVVSVLTVLHQDWLNGKEYKCKVSNKALPAPIEKTISKAKGQPREPQVYTLPPSREEMTKNQVSLTCLVKGFYPSDIAVEWESNGQPENNYKTTPPVLDSDGSFFLYSKLTVDKSRWQQGNVFSCSVMHEALHNHYTQKSLSLSPG

SEQ ID NO: 97 - protein, 456 aa, Artificial Sequence
  source: /note="Description of Artificial Sequence: Synthetic anti-hHER2-HC-S63-LEFIASK-V64 polypeptide"
EVQLVESGGGLVQPGGSLRLSCAASGFNIKDTYIHWVRQAPGKGLEWVARIYPTNGYTRYADSLEFIASKVKGRFTISADTSKNTAYLQMNSLRAEDTAVYYCSRWGGDGFYAMDYWGQGTLVTVSSASTKGPSVFPLAPSSKSTSGGTAALGCLVKDYFPEPVTVSWNSGALTSGVHTFPAVLQSSGLYSLSSVVTVPSSSLGTQTYICNVNHKPSNTKVDKKVEPKSCDKTHTCPPCPAPELLGGPSVFLFPPKPKDTLMISRTPEVTCVVVDVSHEDPEVKFNWYVDGVEVHNAKTKPREEQYNSTYRVVSVLTVLHQDWLNGKEYKCKVSNKALPAPIEKTISKAKGQPREPQVYTLPPSREEMTKNQVSLTCLVKGFYPSDIAVEWESNGQPENNYKTTPPVLDSDGSFFLYSKLTVDKSRWQQGNVFSCSVMHEALHNHYTQKSLSLSPG

SEQ ID NO: 98 - protein, 454 aa, Artificial Sequence
  source: /note="Description of Artificial Sequence: Synthetic anti-hHER2-HC-V64L-EFIAS-K65 polypeptide"
EVQLVESGGGLVQPGGSLRLSCAASGFNIKDTYIHWVRQAPGKGLEWVARIYPTNGYTRYADSLEFIASKGRFTISADTSKNTAYLQMNSLRAEDTAVYYCSRWGGDGFYAMDYWGQGTLVTVSSASTKGPSVFPLAPSSKSTSGGTAALGCLVKDYFPEPVTVSWNSGALTSGVHTFPAVLQSSGLYSLSSVVTVPSSSLGTQTYICNVNHKPSNTKVDKKVEPKSCDKTHTCPPCPAPELLGGPSVFLFPPKPKDTLMISRTPEVTCVVVDVSHEDPEVKFNWYVDGVEVHNAKTKPREEQYNSTYRVVSVLTVLHQDWLNGKEYKCKVSNKALPAPIEKTISKAKGQPREPQVYTLPPSREEMTKNQVSLTCLVKGFYPSDIAVEWESNGQPENNYKTTPPVLDSDGSFFLYSKLTVDKSRWQQGNVFSCSVMHEALHNHYTQKSLSLSPG

SEQ ID NO: 99 - protein, 457 aa, Artificial Sequence
  source: /note="Description of Artificial Sequence: Synthetic anti-hHER2-HC-V64L-EFIASKLA-K65 polypeptide"
EVQLVESGGGLVQPGGSLRLSCAASGFNIKDTYIHWVRQAPGKGLEWVARIYPTNGYTRYADSLEFIASKLAKGRFTISADTSKNTAYLQMNSLRAEDTAVYYCSRWGGDGFYAMDYWGQGTLVTVSSASTKGPSVFPLAPSSKSTSGGTAALGCLVKDYFPEPVTVSWNSGALTSGVHTFPAVLQSSGLYSLSSVVTVPSSSLGTQTYICNVNHKPSNTKVDKKVEPKSCDKTHTCPPCPAPELLGGPSVFLFPPKPKDTLMISRTPEVTCVVVDVSHEDPEVKFNWYVDGVEVHNAKTKPREEQYNSTYRVVSVLTVLHQDWLNGKEYKCKVSNKALPAPIEKTISKAKGQPREPQVYTLPPSREEMTKNQVSLTCLVKGFYPSDIAVEWESNGQPENNYKTTPPVLDSDGSFFLYSKLTVDKSRWQQGNVFSCSVMHEALHNHYTQKSLSLSPG

SEQ ID NO: 100 - protein, 328 aa, Artificial Sequence
  source: /note="Description of Artificial Sequence: Synthetic anti-hHER2-HC-S132G-K133D-S134-T135L-S136-G137W-G138L polypeptide"
STKGPSVFPLAPSGDSLSWLTAALGCLVKDYFPEPVTVSWNSGALTSGVHTFPAVLQSSGLYSLSSVVTVPSSSLGTQTYICNVNHKPSNTKVDKKVEPKSCDKTHTCPPCPAPELLGGPSVFLFPPKPKDTLMISRTPEVTCVVVDVSHEDPEVKFNWYVDGVEVHNAKTKPREEQYNSTYRVVSVLTVLHQDWLNGKEYKCKVSNKALPAPIEKTISKAKGQPREPQVYTLPPSREEMTKNQVSLTCLVKGFYPSDIAVEWESNGQPENNYKTTPPVLDSDGSFFLYSKLTVDKSRWQQGNVFSCSVMHEALHNHYTQKSLSLSPG

SEQ ID NO: 101 - protein, 328 aa, Artificial Sequence
  source: /note="Description of Artificial Sequence: Synthetic anti-hHER2-HC-S132G-K133D-S134-T135L-S136-G137W-G138L- T139L-A140R-A141L-L142-G143N polypeptide"
STKGPSVFPLAPSGDSLSWLLRLLNCLVKDYFPEPVTVSWNSGALTSGVHTFPAVLQSSGLYSLSSVVTVPSSSLGTQTYICNVNHKPSNTKVDKKVEPKSCDKTHTCPPCPAPELLGGPSVFLFPPKPKDTLMISRTPEVTCVVVDVSHEDPEVKFNWYVDGVEVHNAKTKPREEQYNSTYRVVSVLTVLHQDWLNGKEYKCKVSNKALPAPIEKTISKAKGQPREPQVYTLPPSREEMTKNQVSLTCLVKGFYPSDIAVEWESNGQPENNYKTTPPVLDSDGSFFLYSKLTVDKSRWQQGNVFSCSVMHEALHNHYTQKSLSLSPG

SEQ ID NO: 102 - protein, 328 aa, Artificial Sequence
  source: /note="Description of Artificial Sequence: Synthetic anti-hHER2-HC-S132D-K133S-S134L-T135E-S136F-G137I-G138A- T139S-A140K-A141L-L142A polypeptide"
STKGPSVFPLAPSDSLEFIASKLAGCLVKDYFPEPVTVSWNSGALTSGVHTFPAVLQSSGLYSLSSVVTVPSSSLGTQTYICNVNHKPSNTKVDKKVEPKSCDKTHTCPPCPAPELLGGPSVFLFPPKPKDTLMISRTPEVTCVVVDVSHEDPEVKFNWYVDGVEVHNAKTKPREEQYNSTYRVVSVLTVLHQDWLNGKEYKCKVSNKALPAPIEKTISKAKGQPREPQVYTLPPSREEMTKNQVSLTCLVKGFYPSDIAVEWESNGQPENNYKTTPPVLDSDGSFFLYSKLTVDKSRWQQGNVFSCSVMHEALHNHYTQKSLSLSPG

SEQ ID NO: 103 - protein, 334 aa, Artificial Sequence
  source: /note="Description of Artificial Sequence: Synthetic anti-hHER2-HC-K133G-S134D-T135S-S136L-G137S-G138W- LLRLLN-T139 polypeptide"
STKGPSVFPLAPSSGDSLSWLLRLLNTAALGCLVKDYFPEPVTVSWNSGALTSGVHTFPAVLQSSGLYSLSSVVTVPSSSLGTQTYICNVNHKPSNTKVDKKVEPKSCDKTHTCPPCPAPELLGGPSVFLFPPKPKDTLMISRTPEVTCVVVDVSHEDPEVKFNWYVDGVEVHNAKTKPREEQYNSTYRVVSVLTVLHQDWLNGKEYKCKVSNKALPAPIEKTISKAKGQPREPQVYTLPPSREEMTKNQVSLTCLVKGFYPSDIAVEWESNGQPENNYKTTPPVLDSDGSFFLYSKLTVDKSRWQQGNVFSCSVMHEALHNHYTQKSLSLSPG

SEQ ID NO: 104 - protein, 328 aa, Artificial Sequence
  source: /note="Description of Artificial Sequence: Synthetic anti-hHER2-HC-S134G-T135D-G137L-G138S-WLLRLLN-A141 polypeptide"
STKGPSVFPLAPSSKGDSLSWLALGCLVKDYFPEPVTVSWNSGALTSGVHTFPAVLQSSGLYSLSSVVTVPSSSLGTQTYICNVNHKPSNTKVDKKVEPKSCDKTHTCPPCPAPELLGGPSVFLFPPKPKDTLMISRTPEVTCVVVDVSHEDPEVKFNWYVDGVEVHNAKTKPREEQYNSTYRVVSVLTVLHQDWLNGKEYKCKVSNKALPAPIEKTISKAKGQPREPQVYTLPPSREEMTKNQVSLTCLVKGFYPSDIAVEWESNGQPENNYKTTPPVLDSDGSFFLYSKLTVDKSRWQQGNVFSCSVMHEALHNHYTQKSLSLSPG

SEQ ID NO: 105 - protein, 328 aa, Artificial Sequence; identical to SEQ ID NO: 104
  source: /note="Description of Artificial Sequence: Synthetic anti-hHER2-HC-S134G-T135D-S136-G137L-G138S-T139W-A140L polypeptide"

SEQ ID NO: 106 - protein, 333 aa, Artificial Sequence
  source: /note="Description of Artificial Sequence: Synthetic anti-hHER2-HC-S134G-T135D-S136-G137L-G138S-T139W-A140L- LRLLN-A141 polypeptide"
STKGPSVFPLAPSSKGDSLSWLLRLLNALGCLVKDYFPEPVTVSWNSGALTSGVHTFPAVLQSSGLYSLSSVVTVPSSSLGTQTYICNVNHKPSNTKVDKKVEPKSCDKTHTCPPCPAPELLGGPSVFLFPPKPKDTLMISRTPEVTCVVVDVSHEDPEVKFNWYVDGVEVHNAKTKPREEQYNSTYRVVSVLTVLHQDWLNGKEYKCKVSNKALPAPIEKTISKAKGQPREPQVYTLPPSREEMTKNQVSLTCLVKGFYPSDIAVEWESNGQPENNYKTTPPVLDSDGSFFLYSKLTVDKSRWQQGNVFSCSVMHEALHNHYTQKSLSLSPG

SEQ ID NO: 107 - protein, 328 aa, Artificial Sequence
  source: /note="Description of Artificial Sequence: Synthetic anti-hHER2-HC-S134G-T135D-S136-G137L-G138S-T139W-A140L- A141L-L142R-G143L-C144L-L145N polypeptide"
STKGPSVFPLAPSSKGDSLSWLLRLLNVKDYFPEPVTVSWNSGALTSGVHTFPAVLQSSGLYSLSSVVTVPSSSLGTQTYICNVNHKPSNTKVDKKVEPKSCDKTHTCPPCPAPELLGGPSVFLFPPKPKDTLMISRTPEVTCVVVDVSHEDPEVKFNWYVDGVEVHNAKTKPREEQYNSTYRVVSVLTVLHQDWLNGKEYKCKVSNKALPAPIEKTISKAKGQPREPQVYTLPPSREEMTKNQVSLTCLVKGFYPSDIAVEWESNGQPENNYKTTPPVLDSDGSFFLYSKLTVDKSRWQQGNVFSCSVMHEALHNHYTQKSLSLSPG

SEQ ID NO: 108 - protein, 335 aa, Artificial Sequence
  source: /note="Description of Artificial Sequence: Synthetic anti-hHER2-HC-T135G-S136D-G137S-G138L-T139S-WLLRLLN-A140 polypeptide"
STKGPSVFPLAPSSKSGDSLSWLLRLLNAALGCLVKDYFPEPVTVSWNSGALTSGVHTFPAVLQSSGLYSLSSVVTVPSSSLGTQTYICNVNHKPSNTKVDKKVEPKSCDKTHTCPPCPAPELLGGPSVFLFPPKPKDTLMISRTPEVTCVVVDVSHEDPEVKFNWYVDGVEVHNAKTKPREEQYNSTYRVVSVLTVLHQDWLNGKEYKCKVSNKALPAPIEKTISKAKGQPREPQVYTLPPSREEMTKNQVSLTCLVKGFYPSDIAVEWESNGQPENNYKTTPPVLDSDGSFFLYSKLTVDKSRWQQGNVFSCSVMHEALHNHYTQKSLSLSPG

SEQ ID NO: 109 - protein, 328 aa, Artificial Sequence
  source: /note="Description of Artificial Sequence: Synthetic anti-hHER2-HC-P189G-S190D-S191-S192L-L193S-G194W-T195L polypeptide"
STKGPSVFPLAPSSKSTSGGTAALGCLVKDYFPEPVTVSWNSGALTSGVHTFPAVLQSSGLYSLSSVVTVGDSLSWLQTYICNVNHKPSNTKVDKKVEPKSCDKTHTCPPCPAPELLGGPSVFLFPPKPKDTLMISRTPEVTCVVVDVSHEDPEVKFNWYVDGVEVHNAKTKPREEQYNSTYRVVSVLTVLHQDWLNGKEYKCKVSNKALPAPIEKTISKAKGQPREPQVYTLPPSREEMTKNQVSLTCLVKGFYPSDIAVEWESNGQPENNYKTTPPVLDSDGSFFLYSKLTVDKSRWQQGNVFSCSVMHEALHNHYTQKSLSLSPG

SEQ ID NO: 110 - protein, 333 aa, Artificial Sequence
  source: /note="Description of Artificial Sequence: Synthetic anti-hHER2-HC-P189G-S190D-S191-S192L-L193S-G194W-T195L- LRLLN-Q196 polypeptide"
STKGPSVFPLAPSSKSTSGGTAALGCLVKDYFPEPVTVSWNSGALTSGVHTFPAVLQSSGLYSLSSVVTVGDSLSWLLRLLNQTYICNVNHKPSNTKVDKKVEPKSCDKTHTCPPCPAPELLGGPSVFLFPPKPKDTLMISRTPEVTCVVVDVSHEDPEVKFNWYVDGVEVHNAKTKPREEQYNSTYRVVSVLTVLHQDWLNGKEYKCKVSNKALPAPIEKTISKAKGQPREPQVYTLPPSREEMTKNQVSLTCLVKGFYPSDIAVEWESNGQPENNYKTTPPVLDSDGSFFLYSKLTVDKSRWQQGNVFSCSVMHEALHNHYTQKSLSLSPG

SEQ ID NO: 111 - protein, 328 aa, Artificial Sequence
  source: /note="Description of Artificial Sequence: Synthetic anti-hHER2-HC-P189G-S190D-S191-S192L-L193S-G194W-T195L- Q196L-T197R-Y198L-I199L-C200N polypeptide"
STKGPSVFPLAPSSKSTSGGTAALGCLVKDYFPEPVTVSWNSGALTSGVHTFPAVLQSSGLYSLSSVVTVGDSLSWLLRLLNNVNHKPSNTKVDKKVEPKSCDKTHTCPPCPAPELLGGPSVFLFPPKPKDTLMISRTPEVTCVVVDVSHEDPEVKFNWYVDGVEVHNAKTKPREEQYNSTYRVVSVLTVLHQDWLNGKEYKCKVSNKALPAPIEKTISKAKGQPREPQVYTLPPSREEMTKNQVSLTCLVKGFYPSDIAVEWESNGQPENNYKTTPPVLDSDGSFFLYSKLTVDKSRWQQGNVFSCSVMHEALHNHYTQKSLSLSPG

SEQ ID NO: 112 - protein, 328 aa, Artificial Sequence
  source: /note="Description of Artificial Sequence: Synthetic anti-hHER2-HC-P189D-S190-S191L-S192E-L193F-G194I-T195A- Q196S-T197K-Y198L-I199A polypeptide"
STKGPSVFPLAPSSKSTSGGTAALGCLVKDYFPEPVTVSWNSGALTSGVHTFPAVLQSSGLYSLSSVVTVDSLEFIASKLACNVNHKPSNTKVDKKVEPKSCDKTHTCPPCPAPELLGGPSVFLFPPKPKDTLMISRTPEVTCVVVDVSHEDPEVKFNWYVDGVEVHNAKTKPREEQYNSTYRVVSVLTVLHQDWLNGKEYKCKVSNKALPAPIEKTISKAKGQPREPQVYTLPPSREEMTKNQVSLTCLVKGFYPSDIAVEWESNGQPENNYKTTPPVLDSDGSFFLYSKLTVDKSRWQQGNVFSCSVMHEALHNHYTQKSLSLSPG

SEQ ID NO: 113 - protein, 332 aa, Artificial Sequence
  source: /note="Description of Artificial Sequence: Synthetic anti-hHER2-HC-S190G-S191D-S192-L193-G194S-T195W-Q196L- T197L-RLLN-Y198 polypeptide"
STKGPSVFPLAPSSKSTSGGTAALGCLVKDYFPEPVTVSWNSGALTSGVHTFPAVLQSSGLYSLSSVVTVPGDSLSWLLRLLNYICNVNHKPSNTKVDKKVEPKSCDKTHTCPPCPAPELLGGPSVFLFPPKPKDTLMISRTPEVTCVVVDVSHEDPEVKFNWYVDGVEVHNAKTKPREEQYNSTYRVVSVLTVLHQDWLNGKEYKCKVSNKALPAPIEKTISKAKGQPREPQVYTLPPSREEMTKNQVSLTCLVKGFYPSDIAVEWESNGQPENNYKTTPPVLDSDGSFFLYSKLTVDKSRWQQGNVFSCSVMHEALHNHYTQKSLSLSPG

SEQ ID NO: 114 - protein, 328 aa, Artificial Sequence
  source: /note="Description of Artificial Sequence: Synthetic anti-hHER2-HC-S190D-S191-S192L-L193E-G194F-T195I-Q196A- T197S-Y198K-I199L polypeptide"
STKGPSVFPLAPSSKSTSGGTAALGCLVKDYFPEPVTVSWNSGALTSGVHTFPAVLQSSGLYSLSSVVTVPDSLEFIASKLCNVNHKPSNTKVDKKVEPKSCDKTHTCPPCPAPELLGGPSVFLFPPKPKDTLMISRTPEVTCVVVDVSHEDPEVKFNWYVDGVEVHNAKTKPREEQYNSTYRVVSVLTVLHQDWLNGKEYKCKVSNKALPAPIEKTISKAKGQPREPQVYTLPPSREEMTKNQVSLTCLVKGFYPSDIAVEWESNGQPENNYKTTPPVLDSDGSFFLYSKLTVDKSRWQQGNVFSCSVMHEALHNHYTQKSLSLSPG

SEQ ID NO: 115 - protein, 328 aa, Artificial Sequence
  source: /note="Description of Artificial Sequence: Synthetic anti-hHER2-HC-S190D-S191-S192L-L193E-G194F-T195I-Q196A- T197S-Y198K-I199L-C200A polypeptide"
STKGPSVFPLAPSSKSTSGGTAALGCLVKDYFPEPVTVSWNSGALTSGVHTFPAVLQSSGLYSLSSVVTVPDSLEFIASKLANVNHKPSNTKVDKKVEPKSCDKTHTCPPCPAPELLGGPSVFLFPPKPKDTLMISRTPEVTCVVVDVSHEDPEVKFNWYVDGVEVHNAKTKPREEQYNSTYRVVSVLTVLHQDWLNGKEYKCKVSNKALPAPIEKTISKAKGQPREPQVYTLPPSREEMTKNQVSLTCLVKGFYPSDIAVEWESNGQPENNYKTTPPVLDSDGSFFLYSKLTVDKSRWQQGNVFSCSVMHEALHNHYTQKSLSLSPG

SEQ ID NO: 116 - protein, 328 aa, Artificial Sequence
  source: /note="Description of Artificial Sequence: Synthetic anti-hHER2-HC-S191D-S192-L193-G194E-T195F-Q196I-T197A- Y198S-I199K polypeptide"
STKGPSVFPLAPSSKSTSGGTAALGCLVKDYFPEPVTVSWNSGALTSGVHTFPAVLQSSGLYSLSSVVTVPSDSLEFIASKCNVNHKPSNTKVDKKVEPKSCDKTHTCPPCPAPELLGGPSVFLFPPKPKDTLMISRTPEVTCVVVDVSHEDPEVKFNWYVDGVEVHNAKTKPREEQYNSTYRVVSVLTVLHQDWLNGKEYKCKVSNKALPAPIEKTISKAKGQPREPQVYTLPPSREEMTKNQVSLTCLVKGFYPSDIAVEWESNGQPENNYKTTPPVLDSDGSFFLYSKLTVDKSRWQQGNVFSCSVMHEALHNHYTQKSLSLSPG

SEQ ID NO: 117 - protein, 328 aa, Artificial Sequence
  source: /note="Description of Artificial Sequence: Synthetic anti-hHER2-HC-L193G-G194D-T195S-Q196L-T197S-Y198W-I199L polypeptide"
STKGPSVFPLAPSSKSTSGGTAALGCLVKDYFPEPVTVSWNSGALTSGVHTFPAVLQSSGLYSLSSVVTVPSSSGDSLSWLCNVNHKPSNTKVDKKVEPKSCDKTHTCPPCPAPELLGGPSVFLFPPKPKDTLMISRTPEVTCVVVDVSHEDPEVKFNWYVDGVEVHNAKTKPREEQYNSTYRVVSVLTVLHQDWLNGKEYKCKVSNKALPAPIEKTISKAKGQPREPQVYTLPPSREEMTKNQVSLTCLVKGFYPSDIAVEWESNGQPENNYKTTPPVLDSDGSFFLYSKLTVDKSRWQQGNVFSCSVMHEALHNHYTQKSLSLSPG

SEQ ID NO: 118 - protein, 333 aa, Artificial Sequence
  source: /note="Description of Artificial Sequence: Synthetic anti-hHER2-HC-L193G-G194D-T195S-Q196L-T197S-Y198W-I199L- LRLLN-C200 polypeptide"
STKGPSVFPLAPSSKSTSGGTAALGCLVKDYFPEPVTVSWNSGALTSGVHTFPAVLQSSGLYSLSSVVTVPSSSGDSLSWLLRLLNCNVNHKPSNTKVDKKVEPKSCDKTHTCPPCPAPELLGGPSVFLFPPKPKDTLMISRTPEVTCVVVDVSHEDPEVKFNWYVDGVEVHNAKTKPREEQYNSTYRVVSVLTVLHQDWLNGKEYKCKVSNKALPAPIEKTISKAKGQPREPQVYTLPPSREEMTKNQVSLTCLVKGFYPSDIAVEWESNGQPENNYKTTPPVLDSDGSFFLYSKLTVDKSRWQQGNVFSCSVMHEALHNHYTQKSLSLSPG

SEQ ID NO: 119 - protein, 328 aa, Artificial Sequence
  source: /note="Description of Artificial Sequence: Synthetic anti-hHER2-HC-L193G-G194D-T195S-Q196L-T197S-Y198W-I199L- C200L-N201R-V202L-N203L-H204N polypeptide"
STKGPSVFPLAPSSKSTSGGTAALGCLVKDYFPEPVTVSWNSGALTSGVHTFPAVLQSSGLYSLSSVVTVPSSSGDSLSWLLRLLNKPSNTKVDKKVEPKSCDKTHTCPPCPAPELLGGPSVFLFPPKPKDTLMISRTPEVTCVVVDVSHEDPEVKFNWYVDGVEVHNAKTKPREEQYNSTYRVVSVLTVLHQDWLNGKEYKCKVSNKALPAPIEKTISKAKGQPREPQVYTLPPSREEMTKNQVSLTCLVKGFYPSDIAVEWESNGQPENNYKTTPPVLDSDGSFFLYSKLTVDKSRWQQGNVFSCSVMHEALHNHYTQKSLSLSPG

SEQ ID NO: 120 - protein, 328 aa, Artificial Sequence
  source: /note="Description of Artificial Sequence: Synthetic anti-hHER2-HC-E357G-M358D-T359S-K360L-N361S-Q362W-V363L polypeptide"
STKGPSVFPLAPSSKSTSGGTAALGCLVKDYFPEPVTVSWNSGALTSGVHTFPAVLQSSGLYSLSSVVTVPSSSLGTQTYICNVNHKPSNTKVDKKVEPKSCDKTHTCPPCPAPELLGGPSVFLFPPKPKDTLMISRTPEVTCVVVDVSHEDPEVKFNWYVDGVEVHNAKTKPREEQYNSTYRVVSVLTVLHQDWLNGKEYKCKVSNKALPAPIEKTISKAKGQPREPQVYTLPPSREGDSLSWLSLTCLVKGFYPSDIAVEWESNGQPENNYKTTPPVLDSDGSFFLYSKLTVDKSRWQQGNVFSCSVMHEALHNHYTQKSLSLSPG

SEQ ID NO: 121 - protein, 340 aa, Artificial Sequence
  source: /note="Description of Artificial Sequence: Synthetic anti-hHER2-HC-T359-GDSLSWLLRLLN-K360 polypeptide"
STKGPSVFPLAPSSKSTSGGTAALGCLVKDYFPEPVTVSWNSGALTSGVHTFPAVLQSSGLYSLSSVVTVPSSSLGTQTYICNVNHKPSNTKVDKKVEPKSCDKTHTCPPCPAPELLGGPSVFLFPPKPKDTLMISRTPEVTCVVVDVSHEDPEVKFNWYVDGVEVHNAKTKPREEQYNSTYRVVSVLTVLHQDWLNGKEYKCKVSNKALPAPIEKTISKAKGQPREPQVYTLPPSREEMTGDSLSWLLRLLNKNQVSLTCLVKGFYPSDIAVEWESNGQPENNYKTTPPVLDSDGSFFLYSKLTVDKSRWQQGNVFSCSVMHEALHNHYTQKSLSLSPG

SEQ ID NO: 122 - protein, 339 aa, Artificial Sequence
  source: /note="Description of Artificial Sequence: Synthetic anti-hHER2-HC-T359-DSLEFIASKLA-K360 polypeptide"
STKGPSVFPLAPSSKSTSGGTAALGCLVKDYFPEPVTVSWNSGALTSGVHTFPAVLQSSGLYSLSSVVTVPSSSLGTQTYICNVNHKPSNTKVDKKVEPKSCDKTHTCPPCPAPELLGGPSVFLFPPKPKDTLMISRTPEVTCVVVDVSHEDPEVKFNWYVDGVEVHNAKTKPREEQYNSTYRVVSVLTVLHQDWLNGKEYKCKVSNKALPAPIEKTISKAKGQPREPQVYTLPPSREEMTDSLEFIASKLAKNQVSLTCLVKGFYPSDIAVEWESNGQPENNYKTTPPVLDSDGSFFLYSKLTVDKSRWQQGNVFSCSVMHEALHNHYTQKSLSLSPG

SEQ ID NO: 123 - protein, 328 aa, Artificial Sequence
  source: /note="Description of Artificial Sequence: Synthetic anti-hHER2-HC-T359G-K360D-N361S-Q362L-V363S-S364W polypeptide"
STKGPSVFPLAPSSKSTSGGTAALGCLVKDYFPEPVTVSWNSGALTSGVHTFPAVLQSSGLYSLSSVVTVPSSSLGTQTYICNVNHKPSNTKVDKKVEPKSCDKTHTCPPCPAPELLGGPSVFLFPPKPKDTLMISRTPEVTCVVVDVSHEDPEVKFNWYVDGVEVHNAKTKPREEQYNSTYRVVSVLTVLHQDWLNGKEYKCKVSNKALPAPIEKTISKAKGQPREPQVYTLPPSREEMGDSLSWLTCLVKGFYPSDIAVEWESNGQPENNYKTTPPVLDSDGSFFLYSKLTVDKSRWQQGNVFSCSVMHEALHNHYTQKSLSLSPG

SEQ ID NO: 124 - protein, 328 aa, Artificial Sequence
  source: /note="Description of Artificial Sequence: Synthetic anti-hHER2-HC-E382D-S383-N384L-G385S-Q386W-P387L-E388L polypeptide"
STKGPSVFPLAPSSKSTSGGTAALGCLVKDYFPEPVTVSWNSGALTSGVHTFPAVLQSSGLYSLSSVVTVPSSSLGTQTYICNVNHKPSNTKVDKKVEPKSCDKTHTCPPCPAPELLGGPSVFLFPPKPKDTLMISRTPEVTCVVVDVSHEDPEVKFNWYVDGVEVHNAKTKPREEQYNSTYRVVSVLTVLHQDWLNGKEYKCKVSNKALPAPIEKTISKAKGQPREPQVYTLPPSREEMTKNQVSLTCLVKGFYPSDIAVEWDSLSWLLNNYKTTPPVLDSDGSFFLYSKLTVDKSRWQQGNVFSCSVMHEALHNHYTQKSLSLSPG

SEQ ID NO: 125 - protein, 328 aa, Artificial Sequence
  source: /note="Description of Artificial Sequence: Synthetic anti-hHER2-HC-E382D-S383-N384L-G385E-Q386F-P387I-E388A polypeptide"
STKGPSVFPLAPSSKSTSGGTAALGCLVKDYFPEPVTVSWNSGALTSGVHTFPAVLQSSGLYSLSSVVTVPSSSLGTQTYICNVNHKPSNTKVDKKVEPKSCDKTHTCPPCPAPELLGGPSVFLFPPKPKDTLMISRTPEVTCVVVDVSHEDPEVKFNWYVDGVEVHNAKTKPREEQYNSTYRVVSVLTVLHQDWLNGKEYKCKVSNKALPAPIEKTISKAKGQPREPQVYTLPPSREEMTKNQVSLTCLVKGFYPSDIAVEWDSLEFIANNYKTTPPVLDSDGSFFLYSKLTVDKSRWQQGNVFSCSVMHEALHNHYTQKSLSLSPG

SEQ ID NO: 126 - protein, 335 aa, Artificial Sequence
  source: /note="Description of Artificial Sequence: Synthetic anti-hHER2-HC-E388-GDSLSWL-N389 polypeptide"
STKGPSVFPLAPSSKSTSGGTAALGCLVKDYFPEPVTVSWNSGALTSGVHTFPAVLQSSGLYSLSSVVTVPSSSLGTQTYICNVNHKPSNTKVDKKVEPKSCDKTHTCPPCPAPELLGGPSVFLFPPKPKDTLMISRTPEVTCVVVDVSHEDPEVKFNWYVDGVEVHNAKTKPREEQYNSTYRVVSVLTVLHQDWLNGKEYKCKVSNKALPAPIEKTISKAKGQPREPQVYTLPPSREEMTKNQVSLTCLVKGFYPSDIAVEWESNGQPEGDSLSWLNNYKTTPPVLDSDGSFFLYSKLTVDKSRWQQGNVFSCSVMHEALHNHYTQKSLSLSPG

SEQ ID NO: 127 - protein, 340 aa, Artificial Sequence
  source: /note="Description of Artificial Sequence: Synthetic anti-hHER2-HC-E388-GDSLSWLLRLLN-N389 polypeptide"
STKGPSVFPLAPSSKSTSGGTAALGCLVKDYFPEPVTVSWNSGALTSGVHTFPAVLQSSGLYSLSSVVTVPSSSLGTQTYICNVNHKPSNTKVDKKVEPKSCDKTHTCPPCPAPELLGGPSVFLFPPKPKDTLMISRTPEVTCVVVDVSHEDPEVKFNWYVDGVEVHNAKTKPREEQYNSTYRVVSVLTVLHQDWLNGKEYKCKVSNKALPAPIEKTISKAKGQPREPQVYTLPPSREEMTKNQVSLTCLVKGFYPSDIAVEWESNGQPEGDSLSWLLRLLNNNYKTTPPVLDSDGSFFLYSKLTVDKSRWQQGNVFSCSVMHEALHNHYTQKSLSLSPG

SEQ ID NO: 128 - protein, 340 aa, Artificial Sequence
  source: /note="Description of Artificial Sequence: Synthetic anti-hHER2-HC-E388-GDALSWLLRLLN-N389 polypeptide"
STKGPSVFPLAPSSKSTSGGTAALGCLVKDYFPEPVTVSWNSGALTSGVHTFPAVLQSSGLYSLSSVVTVPSSSLGTQTYICNVNHKPSNTKVDKKVEPKSCDKTHTCPPCPAPELLGGPSVFLFPPKPKDTLMISRTPEVTCVVVDVSHEDPEVKFNWYVDGVEVHNAKTKPREEQYNSTYRVVSVLTVLHQDWLNGKEYKCKVSNKALPAPIEKTISKAKGQPREPQVYTLPPSREEMTKNQVSLTCLVKGFYPSDIAVEWESNGQPEGDALSWLLRLLNNNYKTTPPVLDSDGSFFLYSKLTVDKSRWQQGNVFSCSVMHEALHNHYTQKSLSLSPG

SEQ ID NO: 129 - protein, 339 aa, Artificial Sequence
  source: /note="Description of Artificial Sequence: Synthetic anti-hHER2-HC-E388-DSLEFIASKLA-N389 polypeptide"
STKGPSVFPLAPSSKSTSGGTAALGCLVKDYFPEPVTVSWNSGALTSGVHTFPAVLQSSGLYSLSSVVTVPSSSLGTQTYICNVNHKPSNTKVDKKVEPKSCDKTHTCPPCPAPELLGGPSVFLFPPKPKDTLMISRTPEVTCVVVDVSHEDPEVKFNWYVDGVEVHNAKTKPREEQYNSTYRVVSVLTVLHQDWLNGKEYKCKVSNKALPAPIEKTISKAKGQPREPQVYTLPPSREEMTKNQVSLTCLVKGFYPSDIAVEWESNGQPEDSLEFIASKLANNYKTTPPVLDSDGSFFLYSKLTVDKSRWQQGNVFSCSVMHEALHNHYTQKSLSLSPG

SEQ ID NO: 130 - protein, 338 aa, Artificial Sequence
  source: /note="Description of Artificial Sequence: Synthetic anti-hHER2-HC-E388-DSLEFIASKL-N389 polypeptide"
STKGPSVFPLAPSSKSTSGGTAALGCLVKDYFPEPVTVSWNSGALTSGVHTFPAVLQSSGLYSLSSVVTVPSSSLGTQTYICNVNHKPSNTKVDKKVEPKSCDKTHTCPPCPAPELLGGPSVFLFPPKPKDTLMISRTPEVTCVVVDVSHEDPEVKFNWYVDGVEVHNAKTKPREEQYNSTYRVVSVLTVLHQDWLNGKEYKCKVSNKALPAPIEKTISKAKGQPREPQVYTLPPSREEMTKNQVSLTCLVKGFYPSDIAVEWESNGQPEDSLEFIASKLNNYKTTPPVLDSDGSFFLYSKLTVDKSRWQQGNVFSCSVMHEALHNHYTQKSLSLSPG

SEQ ID NO: 131 - protein, 337 aa, Artificial Sequence
  source: /note="Description of Artificial Sequence: Synthetic anti-hHER2-HC-E388-DSLEFIASK-N389 polypeptide"
STKGPSVFPLAPSSKSTSGGTAALGCLVKDYFPEPVTVSWNSGALTSGVHTFPAVLQSSGLYSLSSVVTVPSSSLGTQTYICNVNHKPSNTKVDKKVEPKSCDKTHTCPPCPAPELLGGPSVFLFPPKPKDTLMISRTPEVTCVVVDVSHEDPEVKFNWYVDGVEVHNAKTKPREEQYNSTYRVVSVLTVLHQDWLNGKEYKCKVSNKALPAPIEKTISKAKGQPREPQVYTLPPSREEMTKNQVSLTCLVKGFYPSDIAVEWESNGQPEDSLEFIASKNNYKTTPPVLDSDGSFFLYSKLTVDKSRWQQGNVFSCSVMHEALHNHYTQKSLSLSPG

SEQ ID NO: 132 - protein, 340 aa, Artificial Sequence
  source: /note="Description of Artificial Sequence: Synthetic anti-hHER2-HC-E388-GDSLDMLEWSLM-N389 polypeptide"
STKGPSVFPLAPSSKSTSGGTAALGCLVKDYFPEPVTVSWNSGALTSGVHTFPAVLQSSGLYSLSSVVTVPSSSLGTQTYICNVNHKPSNTKVDKKVEPKSCDKTHTCPPCPAPELLGGPSVFLFPPKPKDTLMISRTPEVTCVVVDVSHEDPEVKFNWYVDGVEVHNAKTKPREEQYNSTYRVVSVLTVLHQDWLNGKEYKCKVSNKALPAPIEKTISKAKGQPREPQVYTLPPSREEMTKNQVSLTCLVKGFYPSDIAVEWESNGQPEGDSLDMLEWSLMNNYKTTPPVLDSDGSFFLYSKLTVDKSRWQQGNVFSCSVMHEALHNHYTQKSLSLSPG

SEQ ID NO: 133 - protein, 328 aa, Artificial Sequence
  source: /note="Description of Artificial Sequence: Synthetic anti-hHER2-HC-L398G-D401L-G402S-S403W-F404L polypeptide"
STKGPSVFPLAPSSKSTSGGTAALGCLVKDYFPEPVTVSWNSGALTSGVHTFPAVLQSSGLYSLSSVVTVPSSSLGTQTYICNVNHKPSNTKVDKKVEPKSCDKTHTCPPCPAPELLGGPSVFLFPPKPKDTLMISRTPEVTCVVVDVSHEDPEVKFNWYVDGVEVHNAKTKPREEQYNSTYRVVSVLTVLHQDWLNGKEYKCKVSNKALPAPIEKTISKAKGQPREPQVYTLPPSREEMTKNQVSLTCLVKGFYPSDIAVEWESNGQPENNYKTTPPVGDSLSWLFLYSKLTVDKSRWQQGNVFSCSVMHEALHNHYTQKSLSLSPG

SEQ ID NO: 134 - protein, 333 aa, Artificial Sequence
  source: /note="Description of Artificial Sequence: Synthetic anti-hHER2-HC-L398G-D399-S400-D401L-G402S-S403W-F404L- LRLLN-F405 polypeptide"
STKGPSVFPLAPSSKSTSGGTAALGCLVKDYFPEPVTVSWNSGALTSGVHTFPAVLQSSGLYSLSSVVTVPSSSLGTQTYICNVNHKPSNTKVDKKVEPKSCDKTHTCPPCPAPELLGGPSVFLFPPKPKDTLMISRTPEVTCVVVDVSHEDPEVKFNWYVDGVEVHNAKTKPREEQYNSTYRVVSVLTVLHQDWLNGKEYKCKVSNKALPAPIEKTISKAKGQPREPQVYTLPPSREEMTKNQVSLTCLVKGFYPSDIAVEWESNGQPENNYKTTPPVGDSLSWLLRLLNFLYSKLTVDKSRWQQGNVFSCSVMHEALHNHYTQKSLSLSPG

SEQ ID NO: 135 - protein, 328 aa, Artificial Sequence
  source: /note="Description of Artificial Sequence: Synthetic anti-hHER2-HC-L398D-D399S-S400L-D401E-G402F-S403I-F404A- F405S-L406K-Y407L-S408A polypeptide"
STKGPSVFPLAPSSKSTSGGTAALGCLVKDYFPEPVTVSWNSGALTSGVHTFPAVLQSSGLYSLSSVVTVPSSSLGTQTYICNVNHKPSNTKVDKKVEPKSCDKTHTCPPCPAPELLGGPSVFLFPPKPKDTLMISRTPEVTCVVVDVSHEDPEVKFNWYVDGVEVHNAKTKPREEQYNSTYRVVSVLTVLHQDWLNGKEYKCKVSNKALPAPIEKTISKAKGQPREPQVYTLPPSREEMTKNQVSLTCLVKGFYPSDIAVEWESNGQPENNYKTTPPVDSLEFIASKLAKLTVDKSRWQQGNVFSCSVMHEALHNHYTQKSLSLSPG

SEQ ID NO: 136 - protein, 340 aa, Artificial Sequence
  source: /note="Description of Artificial Sequence: Synthetic anti-hHER2-HC-S400-GDSLSWLLRLLN-D401 polypeptide"
STKGPSVFPLAPSSKSTSGGTAALGCLVKDYFPEPVTVSWNSGALTSGVHTFPAVLQSSGLYSLSSVVTVPSSSLGTQTYICNVNHKPSNTKVDKKVEPKSCDKTHTCPPCPAPELLGGPSVFLFPPKPKDTLMISRTPEVTCVVVDVSHEDPEVKFNWYVDGVEVHNAKTKPREEQYNSTYRVVSVLTVLHQDWLNGKEYKCKVSNKALPAPIEKTISKAKGQPREPQVYTLPPSREEMTKNQVSLTCLVKGFYPSDIAVEWESNGQPENNYKTTPPVLDSGDSLSWLLRLLNDGSFFLYSKLTVDKSRWQQGNVFSCSVMHEALHNHYTQKSLSLSPG

SEQ ID NO: 137 - protein, 328 aa, Artificial Sequence
  source: /note="Description of Artificial Sequence: Synthetic anti-hHER2-HC-D413-K414S-S415L-R416S-W417-Q418L-Q419L- G420R-N421L-V422L polypeptide"
STKGPSVFPLAPSSKSTSGGTAALGCLVKDYFPEPVTVSWNSGALTSGVHTFPAVLQSSGLYSLSSVVTVPSSSLGTQTYICNVNHKPSNTKVDKKVEPKSCDKTHTCPPCPAPELLGGPSVFLFPPKPKDTLMISRTPEVTCVVVDVSHEDPEVKFNWYVDGVEVHNAKTKPREEQYNSTYRVVSVLTVLHQDWLNGKEYKCKVSNKALPAPIEKTISKAKGQPREPQVYTLPPSREEMTKNQVSLTCLVKGFYPSDIAVEWESNGQPENNYKTTPPVLDSDGSFFLYSKLTVDSLSWLLRLLFSCSVMHEALHNHYTQKSLSLSPG

SEQ ID NO: 138 - protein, 328 aa, Artificial Sequence
  source: /note="Description of Artificial Sequence: Synthetic anti-hHER2-HC-D413-K414S-S415L-R416E-W417F-Q418I-Q419A- G420S-N421K-V422L polypeptide"
STKGPSVFPLAPSSKSTSGGTAALGCLVKDYFPEPVTVSWNSGALTSGVHTFPAVLQSSGLYSLSSVVTVPSSSLGTQTYICNVNHKPSNTKVDKKVEPKSCDKTHTCPPCPAPELLGGPSVFLFPPKPKDTLMISRTPEVTCVVVDVSHEDPEVKFNWYVDGVEVHNAKTKPREEQYNSTYRVVSVLTVLHQDWLNGKEYKCKVSNKALPAPIEKTISKAKGQPREPQVYTLPPSREEMTKNQVSLTCLVKGFYPSDIAVEWESNGQPENNYKTTPPVLDSDGSFFLYSKLTVDSLEFIASKLFSCSVMHEALHNHYTQKSLSLSPG

SEQ ID NO: 139 - protein, 340 aa, Artificial Sequence
  source: /note="Description of Artificial Sequence: Synthetic anti-hHER2-HC-G446-GDSLSWLLRLLN-K447 polypeptide"
STKGPSVFPLAPSSKSTSGGTAALGCLVKDYFPEPVTVSWNSGALTSGVHTFPAVLQSSGLYSLSSVVTVPSSSLGTQTYICNVNHKPSNTKVDKKVEPKSCDKTHTCPPCPAPELLGGPSVFLFPPKPKDTLMISRTPEVTCVVVDVSHEDPEVKFNWYVDGVEVHNAKTKPREEQYNSTYRVVSVLTVLHQDWLNGKEYKCKVSNKALPAPIEKTISKAKGQPREPQVYTLPPSREEMTKNQVSLTCLVKGFYPSDIAVEWESNGQPENNYKTTPPVLDSDGSFFLYSKLTVDKSRWQQGNVFSCSVMHEALHNHYTQKSLSLSPGGDSLSWLLRLLN

SEQ ID NO: 140 - protein, 341 aa, Artificial Sequence
  source: /note="Description of Artificial Sequence: Synthetic anti-hHER2-HC-K447-GDSLSWLLRLLN polypeptide"
STKGPSVFPLAPSSKSTSGGTAALGCLVKDYFPEPVTVSWNSGALTSGVHTFPAVLQSSGLYSLSSVVTVPSSSLGTQTYICNVNHKPSNTKVDKKVEPKSCDKTHTCPPCPAPELLGGPSVFLFPPKPKDTLMISRTPEVTCVVVDVSHEDPEVKFNWYVDGVEVHNAKTKPREEQYNSTYRVVSVLTVLHQDWLNGKEYKCKVSNKALPAPIEKTISKAKGQPREPQVYTLPPSREEMTKNQVSLTCLVKGFYPSDIAVEWESNGQPENNYKTTPPVLDSDGSFFLYSKLTVDKSRWQQGNVFSCSVMHEALHNHYTQKSLSLSPGKGDSLSWLLRLLN

SEQ ID NO: 141 - protein, 340 aa, Artificial Sequence
  source: /note="Description of Artificial Sequence: Synthetic anti-hHER2-HC-K447-DSLEFIASKLA polypeptide"
STKGPSVFPLAPSSKSTSGGTAALGCLVKDYFPEPVTVSWNSGALTSGVHTFPAVLQSSGLYSLSSVVTVPSSSLGTQTYICNVNHKPSNTKVDKKVEPKSCDKTHTCPPCPAPELLGGPSVFLFPPKPKDTLMISRTPEVTCVVVDVSHEDPEVKFNWYVDGVEVHNAKTKPREEQYNSTYRVVSVLTVLHQDWLNGKEYKCKVSNKALPAPIEKTISKAKGQPREPQVYTLPPSREEMTKNQVSLTCLVKGFYPSDIAVEWESNGQPENNYKTTPPVLDSDGSFFLYSKLTVDKSRWQQGNVFSCSVMHEALHNHYTQKSLSLSPGKDSLEFIASKLA

SEQ ID NO: 142 - protein, 472 aa, Artificial Sequence
  source: /note="Description of Artificial Sequence: Synthetic anti-hHER2-HC-V2-GDSLSWLLRLLN-Q3-E388-DSLEFIASKLA-N389 polypeptide"
EVGDSLSWLLRLLNQLVESGGGLVQPGGSLRLSCAASGFNIKDTYIHWVRQAPGKGLEWVARIYPTNGYTRYADSVKGRFTISADTSKNTAYLQMNSLRAEDTAVYYCSRWGGDGFYAMDYWGQGTLVTVSSASTKGPSVFPLAPSSKSTSGGTAALGCLVKDYFPEPVTVSWNSGALTSGVHTFPAVLQSSGLYSLSSVVTVPSSSLGTQTYICNVNHKPSNTKVDKKVEPKSCDKTHTCPPCPAPELLGGPSVFLFPPKPKDTLMISRTPEVTCVVVDVSHEDPEVKFNWYVDGVEVHNAKTKPREEQYNSTYRVVSVLTVLHQDWLNGKEYKCKVSNKALPAPIEKTISKAKGQPREPQVYTLPPSREEMTKNQVSLTCLVKGFYPSDIAVEWESNGQPEDSLEFIASKLANNYKTTPPVLDSDGSFFLYSKLTVDKSRWQQGNVFSCSVMHEALHNHYTQKSLSLSPG

SEQ ID NO: 143 - protein, 340 aa, Artificial Sequence
  source: /note="Description of Artificial Sequence: Synthetic anti-hHER2-HC-Y296-GDSLSWLLRLLN-N297 polypeptide"
STKGPSVFPLAPSSKSTSGGTAALGCLVKDYFPEPVTVSWNSGALTSGVHTFPAVLQSSGLYSLSSVVTVPSSSLGTQTYICNVNHKPSNTKVDKKVEPKSCDKTHTCPPCPAPELLGGPSVFLFPPKPKDTLMISRTPEVTCVVVDVSHEDPEVKFNWYVDGVEVHNAKTKPREEQYGDSLSWLLRLLNNSTYRVVSVLTVLHQDWLNGKEYKCKVSNKALPAPIEKTISKAKGQPREPQVYTLPPSREEMTKNQVSLTCLVKGFYPSDIAVEWESNGQPENNYKTTPPVLDSDGSFFLYSKLTVDKSRWQQGNVFSCSVMHEALHNHYTQKSLSLSPG

SEQ ID NO: 144 - protein, 339 aa, Artificial Sequence
  source: /note="Description of Artificial Sequence: Synthetic anti-hHER2-HC-Y296-DSLEFIASKLA-N297 polypeptide"
STKGPSVFPLAPSSKSTSGGTAALGCLVKDYFPEPVTVSWNSGALTSGVHTFPAVLQSSGLYSLSSVVTVPSSSLGTQTYICNVNHKPSNTKVDKKVEPKSCDKTHTCPPCPAPELLGGPSVFLFPPKPKDTLMISRTPEVTCVVVDVSHEDPEVKFNWYVDGVEVHNAKTKPREEQYDSLEFIASKLANSTYRVVSVLTVLHQDWLNGKEYKCKVSNKALPAPIEKTISKAKGQPREPQVYTLPPSREEMTKNQVSLTCLVKGFYPSDIAVEWESNGQPENNYKTTPPVLDSDGSFFLYSKLTVDKSRWQQGNVFSCSVMHEALHNHYTQKSLSLSPG

SEQ ID NO: 145 - protein, 340 aa, Artificial Sequence
  source: /note="Description of Artificial Sequence: Synthetic anti-hHER2-HC-N297-GDSLSWLLRLLN-S298 polypeptide"
STKGPSVFPLAPSSKSTSGGTAALGCLVKDYFPEPVTVSWNSGALTSGVHTFPAVLQSSGLYSLSSVVTVPSSSLGTQTYICNVNHKPSNTKVDKKVEPKSCDKTHTCPPCPAPELLGGPSVFLFPPKPKDTLMISRTPEVTCVVVDVSHEDPEVKFNWYVDGVEVHNAKTKPREEQYNGDSLSWLLRLLNSTYRVVSVLTVLHQDWLNGKEYKCKVSNKALPAPIEKTISKAKGQPREPQVYTLPPSREEMTKNQVSLTCLVKGFYPSDIAVEWESNGQPENNYKTTPPVLDSDGSFFLYSKLTVDKSRWQQGNVFSCSVMHEALHNHYTQKSLSLSPG

SEQ ID NO: 146 - protein, 339 aa, Artificial Sequence
  source: /note="Description of Artificial Sequence: Synthetic anti-hHER2-HC-N297-DSLEFIASKLA-S298 polypeptide"
STKGPSVFPLAPSSKSTSGGTAALGCLVKDYFPEPVTVSWNSGALTSGVHTFPAVLQSSGLYSLSSVVTVPSSSLGTQTYICNVNHKPSNTKVDKKVEPKSCDKTHTCPPCPAPELLGGPSVFLFPPKPKDTLMISRTPEVTCVVVDVSHEDPEVKFNWYVDGVEVHNAKTKPREEQYNDSLEFIASKLASTYRVVSVLTVLHQDWLNGKEYKCKVSNKALPAPIEKTISKAKGQPREPQVYTLPPSREEMTKNQVSLTCLVKGFYPSDIAVEWESNGQPENNYKTTPPVLDSDGSFFLYSKLTVDKSRWQQGNVFSCSVMHEALHNHYTQKSLSLSPG

SEQ ID NO: 147 - protein, 328 aa, Artificial Sequence
  source: /note="Description of Artificial Sequence: Synthetic mAb2-HC polypeptide"
STKGPSVFPLAPSSKSTSGGTAALGCLVKDYFPEPVTVSWNSGALTSGVHTFPAVLQSSGLYSLSSVVTVPSSSLGTQTYICNVNHKPSNTKVDKRVEPKSCDKTHTCPPCPAPELLGGPSVFLFPPKPKDTLMISRTPEVTCVVVDVSHEDPEVKFNWYVDGVEVHNAKTKPREEQYNSTYRVVSVLTVLHQDWLNGKEYKCKVSNKALPAPIEKTISKAKGQPREPQVYTLPPSREEMTKNQVSLTCLVKGFYPSDIAVEWESNGQPENNYKTTPPVLDSDGSFFLYSKLTVDKSRWQQGNVFSCSVMHEALHNHYTQKSLSLSPG

SEQ ID NO: 148 - protein, 340 aa, Artificial Sequence
  source: /note="Description of Artificial Sequence: Synthetic mAb2-HC-T359-GDSLSWLLRLLN-K360 polypeptide"
STKGPSVFPLAPSSKSTSGGTAALGCLVKDYFPEPVTVSWNSGALTSGVHTFPAVLQSSGLYSLSSVVTVPSSSLGTQTYICNVNHKPSNTKVDKRVEPKSCDKTHTCPPCPAPELLGGPSVFLFPPKPKDTLMISRTPEVTCVVVDVSHEDPEVKFNWYVDGVEVHNAKTKPREEQYNSTYRVVSVLTVLHQDWLNGKEYKCKVSNKALPAPIEKTISKAKGQPREPQVYTLPPSREEMTGDSLSWLLRLLNKNQVSLTCLVKGFYPSDIAVEWESNGQPENNYKTTPPVLDSDGSFFLYSKLTVDKSRWQQGNVFSCSVMHEALHNHYTQKSLSLSPG

SEQ ID NO: 149 - protein, 340 aa, Artificial Sequence
  source: /note="Description of Artificial Sequence: Synthetic mAb2-HC-E388-GDSLSWLLRLLN-N389 polypeptide"
STKGPSVFPLAPSSKSTSGGTAALGCLVKDYFPEPVTVSWNSGALTSGVHTFPAVLQSSGLYSLSSVVTVPSSSLGTQTYICNVNHKPSNTKVDKRVEPKSCDKTHTCPPCPAPELLGGPSVFLFPPKPKDTLMISRTPEVTCVVVDVSHEDPEVKFNWYVDGVEVHNAKTKPREEQYNSTYRVVSVLTVLHQDWLNGKEYKCKVSNKALPAPIEKTISKAKGQPREPQVYTLPPSREEMTKNQVSLTCLVKGFYPSDIAVEWESNGQPEGDSLSWLLRLLNNNYKTTPPVLDSDGSFFLYSKLTVDKSRWQQGNVFSCSVMHEALHNHYTQKSLSLSPG

SEQ ID NO: 150 - protein, 340 aa, Artificial Sequence
  source: /note="Description of Artificial Sequence: Synthetic anti-hHER2-HC-A118-GDSLSWLLRLLN-S119 polypeptide"
GDSLSWLLRLLNSTKGPSVFPLAPSSKSTSGGTAALGCLVKDYFPEPVTVSWNSGALTSGVHTFPAVLQSSGLYSLSSVVTVPSSSLGTQTYICNVNHKPSNTKVDKKVEPKSCDKTHTCPPCPAPELLGGPSVFLFPPKPKDTLMISRTPEVTCVVVDVSHEDPEVKFNWYVDGVEVHNAKTKPREEQYNSTYRVVSVLTVLHQDWLNGKEYKCKVSNKALPAPIEKTISKAKGQPREPQVYTLPPSREEMTKNQVSLTCLVKGFYPSDIAVEWESNGQPENNYKTTPPVLDSDGSFFLYSKLTVDKSRWQQGNVFSCSVMHEALHNHYTQKSLSLSPG

SEQ ID NO: 151 - protein, 340 aa, Artificial Sequence
  source: /note="Description of Artificial Sequence: Synthetic anti-hHER2-HC-S119-GDSLSWLLRLLN-T120 polypeptide"
SGDSLSWLLRLLNTKGPSVFPLAPSSKSTSGGTAALGCLVKDYFPEPVTVSWNSGALTSGVHTFPAVLQSSGLYSLSSVVTVPSSSLGTQTYICNVNHKPSNTKVDKKVEPKSCDKTHTCPPCPAPELLGGPSVFLFPPKPKDTLMISRTPEVTCVVVDVSHEDPEVKFNWYVDGVEVHNAKTKPREEQYNSTYRVVSVLTVLHQDWLNGKEYKCKVSNKALPAPIEKTISKAKGQPREPQVYTLPPSREEMTKNQVSLTCLVKGFYPSDIAVEWESNGQPENNYKTTPPVLDSDGSFFLYSKLTVDKSRWQQGNVFSCSVMHEALHNHYTQKSLSLSPG

SEQ ID NO: 152 - protein, 340 aa, Artificial Sequence
  source: /note="Description of Artificial Sequence: Synthetic anti-hHER2-HC-T120-GDSLSWLLRLLN-K121 polypeptide"
STGDSLSWLLRLLNKGPSVFPLAPSSKSTSGGTAALGCLVKDYFPEPVTVSWNSGALTSGVHTFPAVLQSSGLYSLSSVVTVPSSSLGTQTYICNVNHKPSNTKVDKKVEPKSCDKTHTCPPCPAPELLGGPSVFLFPPKPKDTLMISRTPEVTCVVVDVSHEDPEVKFNWYVDGVEVHNAKTKPREEQYNSTYRVVSVLTVLHQDWLNGKEYKCKVSNKALPAPIEKTISKAKGQPREPQVYTLPPSREEMTKNQVSLTCLVKGFYPSDIAVEWESNGQPENNYKTTPPVLDSDGSFFLYSKLTVDKSRWQQGNVFSCSVMHEALHNHYTQKSLSLSPG

SEQ ID NO: 153 - protein, 340 aa, Artificial Sequence
  source: /note="Description of Artificial Sequence: Synthetic anti-hHER2-HC-S131-GDSLSWLLRLLN-S132 polypeptide"
STKGPSVFPLAPSGDSLSWLLRLLNSKSTSGGTAALGCLVKDYFPEPVTVSWNSGALTSGVHTFPAVLQSSGLYSLSSVVTVPSSSLGTQTYICNVNHKPSNTKVDKKVEPKSCDKTHTCPPCPAPELLGGPSVFLFPPKPKDTLMISRTPEVTCVVVDVSHEDPEVKFNWYVDGVEVHNAKTKPREEQYNSTYRVVSVLTVLHQDWLNGKEYKCKVSNKALPAPIEKTISKAKGQPREPQVYTLPPSREEMTKNQVSLTCLVKGFYPSDIAVEWESNGQPENNYKTTPPVLDSDGSFFLYSKLTVDKSRWQQGNVFSCSVMHEALHNHYTQKSLSLSPG

SEQ ID NO: 154 - protein, 340 aa, Artificial Sequence
  source: /note="Description of Artificial Sequence: Synthetic anti-hHER2-HC-S132-GDSLSWLLRLLN-K133 polypeptide"
STKGPSVFPLAPSSGDSLSWLLRLLNKSTSGGTAALGCLVKDYFPEPVTVSWNSGALTSGVHTFPAVLQSSGLYSLSSVVTVPSSSLGTQTYICNVNHKPSNTKVDKKVEPKSCDKTHTCPPCPAPELLGGPSVFLFPPKPKDTLMISRTPEVTCVVVDVSHEDPEVKFNWYVDGVEVHNAKTKPREEQYNSTYRVVSVLTVLHQDWLNGKEYKCKVSNKALPAPIEKTISKAKGQPREPQVYTLPPSREEMTKNQVSLTCLVKGFYPSDIAVEWESNGQPENNYKTTPPVLDSDGSFFLYSKLTVDKSRWQQGNVFSCSVMHEALHNHYTQKSLSLSPG

SEQ ID NO: 155 - protein, 340 aa, Artificial Sequence
  source: /note="Description of Artificial Sequence: Synthetic anti-hHER2-HC-K133-GDSLSWLLRLLN-S134 polypeptide"
STKGPSVFPLAPSSKGDSLSWLLRLLNSTSGGTAALGCLVKDYFPEPVTVSWNSGALTSGVHTFPAVLQSSGLYSLSSVVTVPSSSLGTQTYICNVNHKPSNTKVDKKVEPKSCDKTHTCPPCPAPELLGGPSVFLFPPKPKDTLMISRTPEVTCVVVDVSHEDPEVKFNWYVDGVEVHNAKTKPREEQYNSTYRVVSVLTVLHQDWLNGKEYKCKVSNKALPAPIEKTISKAKGQPREPQVYTLPPSREEMTKNQVSLTCLVKGFYPSDIAVEWESNGQPENNYKTTPPVLDSDGSFFLYSKLTVDKSRWQQGNVFSCSVMHEALHNHYTQKSLSLSPG

SEQ ID NO: 156 - protein, 340 aa, Artificial Sequence
  source: /note="Description of Artificial Sequence: Synthetic anti-hHER2-HC-S134-GDSLSWLLRLLN-T135 polypeptide"
STKGPSVFPLAPSSKSGDSLSWLLRLLNTSGGTAALGCLVKDYFPEPVTVSWNSGALTSGVHTFPAVLQSSGLYSLSSVVTVPSSSLGTQTYICNVNHKPSNTKVDKKVEPKSCDKTHTCPPCPAPELLGGPSVFLFPPKPKDTLMISRTPEVTCVVVDVSHEDPEVKFNWYVDGVEVHNAKTKPREEQYNSTYRVVSVLTVLHQDWLNGKEYKCKVSNKALPAPIEKTISKAKGQPREPQVYTLPPSREEMTKNQVSLTCLVKGFYPSDIAVEWESNGQPENNYKTTPPVLDSDGSFFLYSKLTVDKSRWQQGNVFSCSVMHEALHNHYTQKSLSLSPG

SEQ ID NO: 157 - protein, 340 aa, Artificial Sequence
  source: /note="Description of Artificial Sequence: Synthetic anti-hHER2-HC-T135-GDSLSWLLRLLN-S136 polypeptide"
STKGPSVFPLAPSSKSTGDSLSWLLRLLNSGGTAALGCLVKDYFPEPVTVSWNSGALTSGVHTFPAVLQSSGLYSLSSVVTVPSSSLGTQTYICNVNHKPSNTKVDKKVEPKSCDKTHTCPPCPAPELLGGPSVFLFPPKPKDTLMISRTPEVTCVVVDVSHEDPEVKFNWYVDGVEVHNAKTKPREEQYNSTYRVVSVLTVLHQDWLNGKEYKCKVSNKALPAPIEKTISKAKGQPREPQVYTLPPSREEMTKNQVSLTCLVKGFYPSDIAVEWESNGQPENNYKTTPPVLDSDGSFFLYSKLTVDKSRWQQGNVFSCSVMHEALHNHYTQKSLSLSPG

SEQ ID NO: 158 - protein, 340 aa, Artificial Sequence
  source: /note="Description of Artificial Sequence: Synthetic anti-hHER2-HC-S136-GDSLSWLLRLLN-G137 polypeptide"
STKGPSVFPLAPSSKSTSGDSLSWLLRLLNGGTAALGCLVKDYFPEPVTVSWNSGALTSGVHTFPAVLQSSGLYSLSSVVTVPSSSLGTQTYICNVNHKPSNTKVDKKVEPKSCDKTHTCPPCPAPELLGGPSVFLFPPKPKDTLMISRTPEVTCVVVDVSHEDPEVKFNWYVDGVEVHNAKTKPREEQYNSTYRVVSVLTVLHQDWLNGKEYKCKVSNKALPAPIEKTISKAKGQPREPQVYTLPPSREEMTKNQVSLTCLVKGFYPSDIAVEWESNGQPENNYKTTPPVLDSDGSFFLYSKLTVDKSRWQQGNVFSCSVMHEALHNHYTQKSLSLSPG

SEQ ID NO: 159 - protein, 340 aa, Artificial Sequence
  source: /note="Description of Artificial Sequence: Synthetic anti-hHER2-HC-G137-GDSLSWLLRLLN-G138 polypeptide"
STKGPSVFPLAPSSKSTSGGDSLSWLLRLLNGTAALGCLVKDYFPEPVTVSWNSGALTSGVHTFPAVLQSSGLYSLSSVVTVPSSSLGTQTYICNVNHKPSNTKVDKKVEPKSCDKTHTCPPCPAPELLGGPSVFLFPPKPKDTLMISRTPEVTCVVVDVSHEDPEVKFNWYVDGVEVHNAKTKPREEQYNSTYRVVSVLTVLHQDWLNGKEYKCKVSNKALPAPIEKTISKAKGQPREPQVYTLPPSREEMTKNQVSLTCLVKGFYPSDIAVEWESNGQPENNYKTTPPVLDSDGSFFLYSKLTVDKSRWQQGNVFSCSVMHEALHNHYTQKSLSLSPG

SEQ ID NO: 160 - protein, 340 aa, Artificial Sequence
  source: /note="Description of Artificial Sequence: Synthetic anti-hHER2-HC-G138-GDSLSWLLRLLN-T139 polypeptide"
STKGPSVFPLAPSSKSTSGGGDSLSWLLRLLNTAALGCLVKDYFPEPVTVSWNSGALTSGVHTFPAVLQSSGLYSLSSVVTVPSSSLGTQTYICNVNHKPSNTKVDKKVEPKSCDKTHTCPPCPAPELLGGPSVFLFPPKPKDTLMISRTPEVTCVVVDVSHEDPEVKFNWYVDGVEVHNAKTKPREEQYNSTYRVVSVLTVLHQDWLNGKEYKCKVSNKALPAPIEKTISKAKGQPREPQVYTLPPSREEMTKNQVSLTCLVKGFYPSDIAVEWESNGQPENNYKTTPPVLDSDGSFFLYSKLTVDKSRWQQGNVFSCSVMHEALHNHYTQKSLSLSPG

SEQ ID NO: 161 - protein, 340 aa, Artificial Sequence
  source: /note="Description of Artificial Sequence: Synthetic anti-hHER2-HC-E152-GDSLSWLLRLLN-P153 polypeptide"
STKGPSVFPLAPSSKSTSGGTAALGCLVKDYFPEGDSLSWLLRLLNPVTVSWNSGALTSGVHTFPAVLQSSGLYSLSSVVTVPSSSLGTQTYICNVNHKPSNTKVDKKVEPKSCDKTHTCPPCPAPELLGGPSVFLFPPKPKDTLMISRTPEVTCVVVDVSHEDPEVKFNWYVDGVEVHNAKTKPREEQYNSTYRVVSVLTVLHQDWLNGKEYKCKVSNKALPAPIEKTISKAKGQPREPQVYTLPPSREEMTKNQVSLTCLVKGFYPSDIAVEWESNGQPENNYKTTPPVLDSDGSFFLYSKLTVDKSRWQQGNVFSCSVMHEALHNHYTQKSLSLSPG

SEQ ID NO: 162 - protein, 340 aa, Artificial Sequence
  source: /note="Description of Artificial Sequence: Synthetic anti-hHER2-HC-P153-GDSLSWLLRLLN-V154 polypeptide"
STKGPSVFPLAPSSKSTSGGTAALGCLVKDYFPEPGDSLSWLLRLLNVTVSWNSGALTSGVHTFPAVLQSSGLYSLSSVVTVPSSSLGTQTYICNVNHKPSNTKVDKKVEPKSCDKTHTCPPCPAPELLGGPSVFLFPPKPKDTLMISRTPEVTCVVVDVSHEDPEVKFNWYVDGVEVHNAKTKPREEQYNSTYRVVSVLTVLHQDWLNGKEYKCKVSNKALPAPIEKTISKAKGQPREPQVYTLPPSREEMTKNQVSLTCLVKGFYPSDIAVEWESNGQPENNYKTTPPVLDSDGSFFLYSKLTVDKSRWQQGNVFSCSVMHEALHNHYTQKSLSLSPG

SEQ ID NO: 163 - protein, 340 aa, Artificial Sequence
  source: /note="Description of Artificial Sequence: Synthetic anti-hHER2-HC-N159-GDSLSWLLRLLN-S160 polypeptide"
STKGPSVFPLAPSSKSTSGGTAALGCLVKDYFPEPVTVSWNGDSLSWLLRLLNSGALTSGVHTFPAVLQSSGLYSLSSVVTVPSSSLGTQTYICNVNHKPSNTKVDKKVEPKSCDKTHTCPPCPAPELLGGPSVFLFPPKPKDTLMISRTPEVTCVVVDVSHEDPEVKFNWYVDGVEVHNAKTKPREEQYNSTYRVVSVLTVLHQDWLNGKEYKCKVSNKALPAPIEKTISKAKGQPREPQVYTLPPSREEMTKNQVSLTCLVKGFYPSDIAVEWESNGQPENNYKTTPPVLDSDGSFFLYSKLTVDKSRWQQGNVFSCSVMHEALHNHYTQKSLSLSPG

SEQ ID NO: 164 - protein, 340 aa, Artificial Sequence
  source: /note="Description of Artificial Sequence: Synthetic anti-hHER2-HC-S160-GDSLSWLLRLLN-G161 polypeptide"
STKGPSVFPLAPSSKSTSGGTAALGCLVKDYFPEPVTVSWNSGDSLSWLLRLLNGALTSGVHTFPAVLQSSGLYSLSSVVTVPSSSLGTQTYICNVNHKPSNTKVDKKVEPKSCDKTHTCPPCPAPELLGGPSVFLFPPKPKDTLMISRTPEVTCVVVDVSHEDPEVKFNWYVDGVEVHNAKTKPREEQYNSTYRVVSVLTVLHQDWLNGKEYKCKVSNKALPAPIEKTISKAKGQPREPQVYTLPPSREEMTKNQVSLTCLVKGFYPSDIAVEWESNGQPENNYKTTPPVLDSDGSFFLYSKLTVDKSRWQQGNVFSCSVMHEALHNHYTQKSLSLSPG

SEQ ID NO: 165 - protein, 340 aa, Artificial Sequence
  source: /note="Description of Artificial Sequence: Synthetic anti-hHER2-HC-G161-GDSLSWLLRLLN-A162 polypeptide"
STKGPSVFPLAPSSKSTSGGTAALGCLVKDYFPEPVTVSWNSGGDSLSWLLRLLNALTSGVHTFPAVLQSSGLYSLSSVVTVPSSSLGTQTYICNVNHKPSNTKVDKKVEPKSCDKTHTCPPCPAPELLGGPSVFLFPPKPKDTLMISRTPEVTCVVVDVSHEDPEVKFNWYVDGVEVHNAKTKPREEQYNSTYRVVSVLTVLHQDWLNGKEYKCKVSNKALPAPIEKTISKAKGQPREPQVYTLPPSREEMTKNQVSLTCLVKGFYPSDIAVEWESNGQPENNYKTTPPVLDSDGSFFLYSKLTVDKSRWQQGNVFSCSVMHEALHNHYTQKSLSLSPG

SEQ ID NO: 166 - protein, 340 aa, Artificial Sequence
  source: /note="Description of Artificial Sequence: Synthetic anti-hHER2-HC-A162-GDSLSWLLRLLN-L163 polypeptide"
STKGPSVFPLAPSSKSTSGGTAALGCLVKDYFPEPVTVSWNSGAGDSLSWLLRLLNLTSGVHTFPAVLQSSGLYSLSSVVTVPSSSLGTQTYICNVNHKPSNTKVDKKVEPKSCDKTHTCPPCPAPELLGGPSVFLFPPKPKDTLMISRTPEVTCVVVDVSHEDPEVKFNWYVDGVEVHNAKTKPREEQYNSTYRVVSVLTVLHQDWLNGKEYKCKVSNKALPAPIEKTISKAKGQPREPQVYTLPPSREEMTKNQVSLTCLVKGFYPSDIAVEWESNGQPENNYKTTPPVLDSDGSFFLYSKLTVDKSRWQQGNVFSCSVMHEALHNHYTQKSLSLSPG

SEQ ID NO: 167 - protein, 340 aa, Artificial Sequence
  source: /note="Description of Artificial Sequence: Synthetic anti-hHER2-HC-L163-GDSLSWLLRLLN-T164 polypeptide"
STKGPSVFPLAPSSKSTSGGTAALGCLVKDYFPEPVTVSWNSGALGDSLSWLLRLLNTSGVHTFPAVLQSSGLYSLSSVVTVPSSSLGTQTYICNVNHKPSNTKVDKKVEPKSCDKTHTCPPCPAPELLGGPSVFLFPPKPKDTLMISRTPEVTCVVVDVSHEDPEVKFNWYVDGVEVHNAKTKPREEQYNSTYRVVSVLTVLHQDWLNGKEYKCKVSNKALPAPIEKTISKAKGQPREPQVYTLPPSREEMTKNQVSLTCLVKGFYPSDIAVEWESNGQPENNYKTTPPVLDSDGSFFLYSKLTVDKSRWQQGNVFSCSVMHEALHNHYTQKSLSLSPG

SEQ ID NO: 168 - protein, 340 aa, Artificial Sequence
  source: /note="Description of Artificial Sequence: Synthetic anti-hHER2-HC-T164-GDSLSWLLRLLN-S165 polypeptide"
STKGPSVFPLAPSSKSTSGGTAALGCLVKDYFPEPVTVSWNSGALTGDSLSWLLRLLNSGVHTFPAVLQSSGLYSLSSVVTVPSSSLGTQTYICNVNHKPSNTKVDKKVEPKSCDKTHTCPPCPAPELLGGPSVFLFPPKPKDTLMISRTPEVTCVVVDVSHEDPEVKFNWYVDGVEVHNAKTKPREEQYNSTYRVVSVLTVLHQDWLNGKEYKCKVSNKALPAPIEKTISKAKGQPREPQVYTLPPSREEMTKNQVSLTCLVKGFYPSDIAVEWESNGQPENNYKTTPPVLDSDGSFFLYSKLTVDKSRWQQGNVFSCSVMHEALHNHYTQKSLSLSPG

SEQ ID NO: 169 - protein, 340 aa, Artificial Sequence
  source: /note="Description of Artificial Sequence: Synthetic anti-hHER2-HC-S165-GDSLSWLLRLLN-G166 polypeptide"
STKGPSVFPLAPSSKSTSGGTAALGCLVKDYFPEPVTVSWNSGALTSGDSLSWLLRLLNGVHTFPAVLQSSGLYSLSSVVTVPSSSLGTQTYICNVNHKPSNTKVDKKVEPKSCDKTHTCPPCPAPELLGGPSVFLFPPKPKDTLMISRTPEVTCVVVDVSHEDPEVKFNWYVDGVEVHNAKTKPREEQYNSTYRVVSVLTVLHQDWLNGKEYKCKVSNKALPAPIEKTISKAKGQPREPQVYTLPPSREEMTKNQVSLTCLVKGFYPSDIAVEWESNGQPENNYKTTPPVLDSDGSFFLYSKLTVDKSRWQQGNVFSCSVMHEALHNHYTQKSLSLSPG

SEQ ID NO: 170 - protein, 340 aa, Artificial Sequence
  source: /note="Description of Artificial Sequence: Synthetic anti-hHER2-HC-P171-GDSLSWLLRLLN-A172 polypeptide"
STKGPSVFPLAPSSKSTSGGTAALGCLVKDYFPEPVTVSWNSGALTSGVHTFPGDSLSWLLRLLNAVLQSSGLYSLSSVVTVPSSSLGTQTYICNVNHKPSNTKVDKKVEPKSCDKTHTCPPCPAPELLGGPSVFLFPPKPKDTLMISRTPEVTCVVVDVSHEDPEVKFNWYVDGVEVHNAKTKPREEQYNSTYRVVSVLTVLHQDWLNGKEYKCKVSNKALPAPIEKTISKAKGQPREPQVYTLPPSREEMTKNQVSLTCLVKGFYPSDIAVEWESNGQPENNYKTTPPVLDSDGSFFLYSKLTVDKSRWQQGNVFSCSVMHEALHNHYTQKSLSLSPG

SEQ ID NO: 171 - protein, 340 aa, Artificial Sequence
  source: /note="Description of Artificial Sequence: Synthetic anti-hHER2-HC-S176-GDSLSWLLRLLN-S177 polypeptide"
STKGPSVFPLAPSSKSTSGGTAALGCLVKDYFPEPVTVSWNSGALTSGVHTFPAVLQSGDSLSWLLRLLNSGLYSLSSVVTVPSSSLGTQTYICNVNHKPSNTKVDKKVEPKSCDKTHTCPPCPAPELLGGPSVFLFPPKPKDTLMISRTPEVTCVVVDVSHEDPEVKFNWYVDGVEVHNAKTKPREEQYNSTYRVVSVLTVLHQDWLNGKEYKCKVSNKALPAPIEKTISKAKGQPREPQVYTLPPSREEMTKNQVSLTCLVKGFYPSDIAVEWESNGQPENNYKTTPPVLDSDGSFFLYSKLTVDKSRWQQGNVFSCSVMHEALHNHYTQKSLSLSPG

SEQ ID NO: 172 - protein, 340 aa, Artificial Sequence
  source: /note="Description of Artificial Sequence: Synthetic anti-hHER2-HC-S177-GDSLSWLLRLLN-G178 polypeptide"
STKGPSVFPLAPSSKSTSGGTAALGCLVKDYFPEPVTVSWNSGALTSGVHTFPAVLQSSGDSLSWLLRLLNGLYSLSSVVTVPSSSLGTQTYICNVNHKPSNTKVDKKVEPKSCDKTHTCPPCPAPELLGGPSVFLFPPKPKDTLMISRTPEVTCVVVDVSHEDPEVKFNWYVDGVEVHNAKTKPREEQYNSTYRVVSVLTVLHQDWLNGKEYKCKVSNKALPAPIEKTISKAKGQPREPQVYTLPPSREEMTKNQVSLTCLVKGFYPSDIAVEWESNGQPENNYKTTPPVLDSDGSFFLYSKLTVDKSRWQQGNVFSCSVMHEALHNHYTQKSLSLSPG

SEQ ID NO: 173 - protein, 340 aa, Artificial Sequence
  source: /note="Description of Artificial Sequence: Synthetic anti-hHER2-HC-P189-GDSLSWLLRLLN-S190 polypeptide"
STKGPSVFPLAPSSKSTSGGTAALGCLVKDYFPEPVTVSWNSGALTSGVHTFPAVLQSSGLYSLSSVVTVPGDSLSWLLRLLNSSSLGTQTYICNVNHKPSNTKVDKKVEPKSCDKTHTCPPCPAPELLGGPSVFLFPPKPKDTLMISRTPEVTCVVVDVSHEDPEVKFNWYVDGVEVHNAKTKPREEQYNSTYRVVSVLTVLHQDWLNGKEYKCKVSNKALPAPIEKTISKAKGQPREPQVYTLPPSREEMTKNQVSLTCLVKGFYPSDIAVEWESNGQPENNYKTTPPVLDSDGSFFLYSKLTVDKSRWQQGNVFSCSVMHEALHNHYTQKSLSLSPG

SEQ ID NO: 174 - protein, 340 aa, Artificial Sequence
  source: /note="Description of Artificial Sequence: Synthetic anti-hHER2-HC-S190-GDSLSWLLRLLN-S191 polypeptide"
STKGPSVFPLAPSSKSTSGGTAALGCLVKDYFPEPVTVSWNSGALTSGVHTFPAVLQSSGLYSLSSVVTVPSGDSLSWLLRLLNSSLGTQTYICNVNHKPSNTKVDKKVEPKSCDKTHTCPPCPAPELLGGPSVFLFPPKPKDTLMISRTPEVTCVVVDVSHEDPEVKFNWYVDGVEVHNAKTKPREEQYNSTYRVVSVLTVLHQDWLNGKEYKCKVSNKALPAPIEKTISKAKGQPREPQVYTLPPSREEMTKNQVSLTCLVKGFYPSDIAVEWESNGQPENNYKTTPPVLDSDGSFFLYSKLTVDKSRWQQGNVFSCSVMHEALHNHYTQKSLSLSPG

SEQ ID NO: 175 - protein, 340 aa, Artificial Sequence
  source: /note="Description of Artificial Sequence: Synthetic anti-hHER2-HC-S191-GDSLSWLLRLLN-S192 polypeptide"
STKGPSVFPLAPSSKSTSGGTAALGCLVKDYFPEPVTVSWNSGALTSGVHTFPAVLQSSGLYSLSSVVTVPSSGDSLSWLLRLLNSLGTQTYICNVNHKPSNTKVDKKVEPKSCDKTHTCPPCPAPELLGGPSVFLFPPKPKDTLMISRTPEVTCVVVDVSHEDPEVKFNWYVDGVEVHNAKTKPREEQYNSTYRVVSVLTVLHQDWLNGKEYKCKVSNKALPAPIEKTISKAKGQPREPQVYTLPPSREEMTKNQVSLTCLVKGFYPSDIAVEWESNGQPENNYKTTPPVLDSDGSFFLYSKLTVDKSRWQQGNVFSCSVMHEALHNHYTQKSLSLSPG

SEQ ID NO: 176 - protein, 340 aa, Artificial Sequence
  source: /note="Description of Artificial Sequence: Synthetic anti-hHER2-HC-S192-GDSLSWLLRLLN-L193 polypeptide"
STKGPSVFPLAPSSKSTSGGTAALGCLVKDYFPEPVTVSWNSGALTSGVHTFPAVLQSSGLYSLSSVVTVPSSSGDSLSWLLRLLNLGTQTYICNVNHKPSNTKVDKKVEPKSCDKTHTCPPCPAPELLGGPSVFLFPPKPKDTLMISRTPEVTCVVVDVSHEDPEVKFNWYVDGVEVHNAKTKPREEQYNSTYRVVSVLTVLHQDWLNGKEYKCKVSNKALPAPIEKTISKAKGQPREPQVYTLPPSREEMTKNQVSLTCLVKGFYPSDIAVEWESNGQPENNYKTTPPVLDSDGSFFLYSKLTVDKSRWQQGNVFSCSVMHEALHNHYTQKSLSLSPG

SEQ ID NO: 177 - protein, 340 aa, Artificial Sequence
  source: /note="Description of Artificial Sequence: Synthetic anti-hHER2-HC-L193-GDSLSWLLRLLN-G194 polypeptide"
STKGPSVFPLAPSSKSTSGGTAALGCLVKDYFPEPVTVSWNSGALTSGVHTFPAVLQSSGLYSLSSVVTVPSSSLGDSLSWLLRLLNGTQTYICNVNHKPSNTKVDKKVEPKSCDKTHTCPPCPAPELLGGPSVFLFPPKPKDTLMISRTPEVTCVVVDVSHEDPEVKFNWYVDGVEVHNAKTKPREEQYNSTYRVVSVLTVLHQDWLNGKEYKCKVSNKALPAPIEKTISKAKGQPREPQVYTLPPSREEMTKNQVSLTCLVKGFYPSDIAVEWESNGQPENNYKTTPPVLDSDGSFFLYSKLTVDKSRWQQGNVFSCSVMHEALHNHYTQKSLSLSPG

SEQ ID NO: 178 - protein, 340 aa, Artificial Sequence
  source: /note="Description of Artificial Sequence: Synthetic anti-hHER2-HC-G194-GDSLSWLLRLLN-T195 polypeptide"
STKGPSVFPLAPSSKSTSGGTAALGCLVKDYFPEPVTVSWNSGALTSGVHTFPAVLQSSGLYSLSSVVTVPSSSLGGDSLSWLLRLLNTQTYICNVNHKPSNTKVDKKVEPKSCDKTHTCPPCPAPELLGGPSVFLFPPKPKDTLMISRTPEVTCVVVDVSHEDPEVKFNWYVDGVEVHNAKTKPREEQYNSTYRVVSVLTVLHQDWLNGKEYKCKVSNKALPAPIEKTISKAKGQPREPQVYTLPPSREEMTKNQVSLTCLVKGFYPSDIAVEWESNGQPENNYKTTPPVLDSDGSFFLYSKLTVDKSRWQQGNVFSCSVMHEALHNHYTQKSLSLSPG

SEQ ID NO: 179 - protein, 340 aa, Artificial Sequence
  source: /note="Description of Artificial Sequence: Synthetic anti-hHER2-HC-T195-GDSLSWLLRLLN-Q196 polypeptide"
STKGPSVFPLAPSSKSTSGGTAALGCLVKDYFPEPVTVSWNSGALTSGVHTFPAVLQSSGLYSLSSVVTVPSSSLGTGDSLSWLLRLLNQTYICNVNHKPSNTKVDKKVEPKSCDKTHTCPPCPAPELLGGPSVFLFPPKPKDTLMISRTPEVTCVVVDVSHEDPEVKFNWYVDGVEVHNAKTKPREEQYNSTYRVVSVLTVLHQDWLNGKEYKCKVSNKALPAPIEKTISKAKGQPREPQVYTLPPSREEMTKNQVSLTCLVKGFYPSDIAVEWESNGQPENNYKTTPPVLDSDGSFFLYSKLTVDKSRWQQGNVFSCSVMHEALHNHYTQKSLSLSPG

SEQ ID NO: 180 - protein, 340 aa, Artificial Sequence
  source: /note="Description of Artificial Sequence: Synthetic anti-hHER2-HC-Q196-GDSLSWLLRLLN-T197 polypeptide"
STKGPSVFPLAPSSKSTSGGTAALGCLVKDYFPEPVTVSWNSGALTSGVHTFPAVLQSSGLYSLSSVVTVPSSSLGTQGDSLSWLLRLLNTYICNVNHKPSNTKVDKKVEPKSCDKTHTCPPCPAPELLGGPSVFLFPPKPKDTLMISRTPEVTCVVVDVSHEDPEVKFNWYVDGVEVHNAKTKPREEQYNSTYRVVSVLTVLHQDWLNGKEYKCKVSNKALPAPIEKTISKAKGQPREPQVYTLPPSREEMTKNQVSLTCLVKGFYPSDIAVEWESNGQPENNYKTTPPVLDSDGSFFLYSKLTVDKSRWQQGNVFSCSVMHEALHNHYTQKSLSLSPG

SEQ ID NO: 181 - protein, 340 aa, Artificial Sequence
  source: /note="Description of Artificial Sequence: Synthetic anti-hHER2-HC-K205-GDSLSWLLRLLN-P206 polypeptide"
STKGPSVFPLAPSSKSTSGGTAALGCLVKDYFPEPVTVSWNSGALTSGVHTFPAVLQSSGLYSLSSVVTVPSSSLGTQTYICNVNHKGDSLSWLLRLLNPSNTKVDKKVEPKSCDKTHTCPPCPAPELLGGPSVFLFPPKPKDTLMISRTPEVTCVVVDVSHEDPEVKFNWYVDGVEVHNAKTKPREEQYNSTYRVVSVLTVLHQDWLNGKEYKCKVSNKALPAPIEKTISKAKGQPREPQVYTLPPSREEMTKNQVSLTCLVKGFYPSDIAVEWESNGQPENNYKTTPPVLDSDGSFFLYSKLTVDKSRWQQGNVFSCSVMHEALHNHYTQKSLSLSPG

SEQ ID NO: 182 - protein, 340 aa, Artificial Sequence
  source: /note="Description of Artificial Sequence: Synthetic anti-hHER2-HC-P206-GDSLSWLLRLLN-S207 polypeptide"
STKGPSVFPLAPSSKSTSGGTAALGCLVKDYFPEPVTVSWNSGALTSGVHTFPAVLQSSGLYSLSSVVTVPSSSLGTQTYICNVNHKPGDSLSWLLRLLNSNTKVDKKVEPKSCDKTHTCPPCPAPELLGGPSVFLFPPKPKDTLMISRTPEVTCVVVDVSHEDPEVKFNWYVDGVEVHNAKTKPREEQYNSTYRVVSVLTVLHQDWLNGKEYKCKVSNKALPAPIEKTISKAKGQPREPQVYTLPPSREEMTKNQVSLTCLVKGFYPSDIAVEWESNGQPENNYKTTPPVLDSDGSFFLYSKLTVDKSRWQQGNVFSCSVMHEALHNHYTQKSLSLSPG

SEQ ID NO: 183 - protein, 340 aa, Artificial Sequence
  source: /note="Description of Artificial Sequence: Synthetic anti-hHER2-HC-S207-GDSLSWLLRLLN-N208 polypeptide"
STKGPSVFPLAPSSKSTSGGTAALGCLVKDYFPEPVTVSWNSGALTSGVHTFPAVLQSSGLYSLSSVVTVPSSSLGTQTYICNVNHKPSGDSLSWLLRLLNNTKVDKKVEPKSCDKTHTCPPCPAPELLGGPSVFLFPPKPKDTLMISRTPEVTCVVVDVSHEDPEVKFNWYVDGVEVHNAKTKPREEQYNSTYRVVSVLTVLHQDWLNGKEYKCKVSNKALPAPIEKTISKAKGQPREPQVYTLPPSREEMTKNQVSLTCLVKGFYPSDIAVEWESNGQPENNYKTTPPVLDSDGSFFLYSKLTVDKSRWQQGNVFSCSVMHEALHNHYTQKSLSLSPG

SEQ ID NO: 184 - protein, 340 aa, Artificial Sequence
  source: /note="Description of Artificial Sequence: Synthetic anti-hHER2-HC-P230-GDSLSWLLRLLN-A231 polypeptide"
STKGPSVFPLAPSSKSTSGGTAALGCLVKDYFPEPVTVSWNSGALTSGVHTFPAVLQSSGLYSLSSVVTVPSSSLGTQTYICNVNHKPSNTKVDKKVEPKSCDKTHTCPPCPGDSLSWLLRLLNAPELLGGPSVFLFPPKPKDTLMISRTPEVTCVVVDVSHEDPEVKFNWYVDGVEVHNAKTKPREEQYNSTYRVVSVLTVLHQDWLNGKEYKCKVSNKALPAPIEKTISKAKGQPREPQVYTLPPSREEMTKNQVSLTCLVKGFYPSDIAVEWESNGQPENNYKTTPPVLDSDGSFFLYSKLTVDKSRWQQGNVFSCSVMHEALHNHYTQKSLSLSPG

SEQ ID NO: 185 - protein, 340 aa, Artificial Sequence
  source: /note="Description of Artificial Sequence: Synthetic anti-hHER2-HC-A231-GDSLSWLLRLLN-P232 polypeptide"
STKGPSVFPLAPSSKSTSGGTAALGCLVKDYFPEPVTVSWNSGALTSGVHTFPAVLQSSGLYSLSSVVTVPSSSLGTQTYICNVNHKPSNTKVDKKVEPKSCDKTHTCPPCPAGDSLSWLLRLLNPELLGGPSVFLFPPKPKDTLMISRTPEVTCVVVDVSHEDPEVKFNWYVDGVEVHNAKTKPREEQYNSTYRVVSVLTVLHQDWLNGKEYKCKVSNKALPAPIEKTISKAKGQPREPQVYTLPPSREEMTKNQVSLTCLVKGFYPSDIAVEWESNGQPENNYKTTPPVLDSDGSFFLYSKLTVDKSRWQQGNVFSCSVMHEALHNHYTQKSLSLSPG

SEQ ID NO: 186 - protein, 340 aa, Artificial Sequence
  source: /note="Description of Artificial Sequence: Synthetic anti-hHER2-HC-P232-GDSLSWLLRLLN-E233 polypeptide"
STKGPSVFPLAPSSKSTSGGTAALGCLVKDYFPEPVTVSWNSGALTSGVHTFPAVLQSSGLYSLSSVVTVPSSSLGTQTYICNVNHKPSNTKVDKKVEPKSCDKTHTCPPCPAPGDSLSWLLRLLNELLGGPSVFLFPPKPKDTLMISRTPEVTCVVVDVSHEDPEVKFNWYVDGVEVHNAKTKPREEQYNSTYRVVSVLTVLHQDWLNGKEYKCKVSNKALPAPIEKTISKAKGQPREPQVYTLPPSREEMTKNQVSLTCLVKGFYPSDIAVEWESNGQPENNYKTTPPVLDSDGSFFLYSKLTVDKSRWQQGNVFSCSVMHEALHNHYTQKSLSLSPG

SEQ ID NO: 187 - protein, 340 aa, Artificial Sequence
  source: /note="Description of Artificial Sequence: Synthetic anti-hHER2-HC-E233-GDSLSWLLRLLN-L234 polypeptide"
STKGPSVFPLAPSSKSTSGGTAALGCLVKDYFPEPVTVSWNSGALTSGVHTFPAVLQSSGLYSLSSVVTVPSSSLGTQTYICNVNHKPSNTKVDKKVEPKSCDKTHTCPPCPAPEGDSLSWLLRLLNLLGGPSVFLFPPKPKDTLMISRTPEVTCVVVDVSHEDPEVKFNWYVDGVEVHNAKTKPREEQYNSTYRVVSVLTVLHQDWLNGKEYKCKVSNKALPAPIEKTISKAKGQPREPQVYTLPPSREEMTKNQVSLTCLVKGFYPSDIAVEWESNGQPENNYKTTPPVLDSDGSFFLYSKLTVDKSRWQQGNVFSCSVMHEALHNHYTQKSLSLSPG

SEQ ID NO: 188 - protein, 340 aa, Artificial Sequence
  source: /note="Description of Artificial Sequence: Synthetic anti-hHER2-HC-L234-GDSLSWLLRLLN-L235 polypeptide"
STKGPSVFPLAPSSKSTSGGTAALGCLVKDYFPEPVTVSWNSGALTSGVHTFPAVLQSSGLYSLSSVVTVPSSSLGTQTYICNVNHKPSNTKVDKKVEPKSCDKTHTCPPCPAPELGDSLSWLLRLLNLGGPSVFLFPPKPKDTLMISRTPEVTCVVVDVSHEDPEVKFNWYVDGVEVHNAKTKPREEQYNSTYRVVSVLTVLHQDWLNGKEYKCKVSNKALPAPIEKTISKAKGQPREPQVYTLPPSREEMTKNQVSLTCLVKGFYPSDIAVEWESNGQPENNYKTTPPVLDSDGSFFLYSKLTVDKSRWQQGNVFSCSVMHEALHNHYTQKSLSLSPG

SEQ ID NO: 189 - protein, 340 aa, Artificial Sequence
  source: /note="Description of Artificial Sequence: Synthetic anti-hHER2-HC-L235-GDSLSWLLRLLN-G236 polypeptide"
STKGPSVFPLAPSSKSTSGGTAALGCLVKDYFPEPVTVSWNSGALTSGVHTFPAVLQSSGLYSLSSVVTVPSSSLGTQTYICNVNHKPSNTKVDKKVEPKSCDKTHTCPPCPAPELLGDSLSWLLRLLNGGPSVFLFPPKPKDTLMISRTPEVTCVVVDVSHEDPEVKFNWYVDGVEVHNAKTKPREEQYNSTYRVVSVLTVLHQDWLNGKEYKCKVSNKALPAPIEKTISKAKGQPREPQVYTLPPSREEMTKNQVSLTCLVKGFYPSDIAVEWESNGQPENNYKTTPPVLDSDGSFFLYSKLTVDKSRWQQGNVFSCSVMHEALHNHYTQKSLSLSPG

SEQ ID NO: 190 - protein, 340 aa, Artificial Sequence
  source: /note="Description of Artificial Sequence: Synthetic anti-hHER2-HC-G236-GDSLSWLLRLLN-G237 polypeptide"
STKGPSVFPLAPSSKSTSGGTAALGCLVKDYFPEPVTVSWNSGALTSGVHTFPAVLQSSGLYSLSSVVTVPSSSLGTQTYICNVNHKPSNTKVDKKVEPKSCDKTHTCPPCPAPELLGGDSLSWLLRLLNGPSVFLFPPKPKDTLMISRTPEVTCVVVDVSHEDPEVKFNWYVDGVEVHNAKTKPREEQYNSTYRVVSVLTVLHQDWLNGKEYKCKVSNKALPAPIEKTISKAKGQPREPQVYTLPPSREEMTKNQVSLTCLVKGFYPSDIAVEWESNGQPENNYKTTPPVLDSDGSFFLYSKLTVDKSRWQQGNVFSCSVMHEALHNHYTQKSLSLSPG

SEQ ID NO: 191 - protein, 340 aa, Artificial Sequence
  source: /note="Description of Artificial Sequence: Synthetic anti-hHER2-HC-P244-GDSLSWLLRLLN-P245 polypeptide"
STKGPSVFPLAPSSKSTSGGTAALGCLVKDYFPEPVTVSWNSGALTSGVHTFPAVLQSSGLYSLSSVVTVPSSSLGTQTYICNVNHKPSNTKVDKKVEPKSCDKTHTCPPCPAPELLGGPSVFLFPGDSLSWLLRLLNPKPKDTLMISRTPEVTCVVVDVSHEDPEVKFNWYVDGVEVHNAKTKPREEQYNSTYRVVSVLTVLHQDWLNGKEYKCKVSNKALPAPIEKTISKAKGQPREPQVYTLPPSREEMTKNQVSLTCLVKGFYPSDIAVEWESNGQPENNYKTTPPVLDSDGSFFLYSKLTVDKSRWQQGNVFSCSVMHEALHNHYTQKSLSLSPG

SEQ ID NO: 192 - protein, 340 aa, Artificial Sequence
  source: /note="Description of Artificial Sequence: Synthetic anti-hHER2-HC-P245-GDSLSWLLRLLN-K246 polypeptide"
STKGPSVFPLAPSSKSTSGGTAALGCLVKDYFPEPVTVSWNSGALTSGVHTFPAVLQSSGLYSLSSVVTVPSSSLGTQTYICNVNHKPSNTKVDKKVEPKSCDKTHTCPPCPAPELLGGPSVFLFPPGDSLSWLLRLLNKPKDTLMISRTPEVTCVVVDVSHEDPEVKFNWYVDGVEVHNAKTKPREEQYNSTYRVVSVLTVLHQDWLNGKEYKCKVSNKALPAPIEKTISKAKGQPREPQVYTLPPSREEMTKNQVSLTCLVKGFYPSDIAVEWESNGQPENNYKTTPPVLDSDGSFFLYSKLTVDKSRWQQGNVFSCSVMHEALHNHYTQKSLSLSPG

SEQ ID NO: 193 - protein, 340 aa, Artificial Sequence
  source: /note="Description of Artificial Sequence: Synthetic anti-hHER2-HC-I253-GDSLSWLLRLLN-S254 polypeptide"
STKGPSVFPLAPSSKSTSGGTAALGCLVKDYFPEPVTVSWNSGALTSGVHTFPAVLQSSGLYSLSSVVTVPSSSLGTQTYICNVNHKPSNTKVDKKVEPKSCDKTHTCPPCPAPELLGGPSVFLFPPKPKDTLMIGDSLSWLLRLLNSRTPEVTCVVVDVSHEDPEVKFNWYVDGVEVHNAKTKPREEQYNSTYRVVSVLTVLHQDWLNGKEYKCKVSNKALPAPIEKTISKAKGQPREPQVYTLPPSREEMTKNQVSLTCLVKGFYPSDIAVEWESNGQPENNYKTTPPVLDSDGSFFLYSKLTVDKSRWQQGNVFSCSVMHEALHNHYTQKSLSLSPG

SEQ ID NO: 194 - protein, 340 aa, Artificial Sequence
  source: /note="Description of Artificial Sequence: Synthetic anti-hHER2-HC-S254-GDSLSWLLRLLN-R255 polypeptide"
STKGPSVFPLAPSSKSTSGGTAALGCLVKDYFPEPVTVSWNSGALTSGVHTFPAVLQSSGLYSLSSVVTVPSSSLGTQTYICNVNHKPSNTKVDKKVEPKSCDKTHTCPPCPAPELLGGPSVFLFPPKPKDTLMISGDSLSWLLRLLNRTPEVTCVVVDVSHEDPEVKFNWYVDGVEVHNAKTKPREEQYNSTYRVVSVLTVLHQDWLNGKEYKCKVSNKALPAPIEKTISKAKGQPREPQVYTLPPSREEMTKNQVSLTCLVKGFYPSDIAVEWESNGQPENNYKTTPPVLDSDGSFFLYSKLTVDKSRWQQGNVFSCSVMHEALHNHYTQKSLSLSPG

SEQ ID NO: 195 - protein, 340 aa, Artificial Sequence
  source: /note="Description of Artificial Sequence: Synthetic anti-hHER2-HC-R255-GDSLSWLLRLLN-T256 polypeptide"
STKGPSVFPLAPSSKSTSGGTAALGCLVKDYFPEPVTVSWNSGALTSGVHTFPAVLQSSGLYSLSSVVTVPSSSLGTQTYICNVNHKPSNTKVDKKVEPKSCDKTHTCPPCPAPELLGGPSVFLFPPKPKDTLMISRGDSLSWLLRLLNTPEVTCVVVDVSHEDPEVKFNWYVDGVEVHNAKTKPREEQYNSTYRVVSVLTVLHQDWLNGKEYKCKVSNKALPAPIEKTISKAKGQPREPQVYTLPPSREEMTKNQVSLTCLVKGFYPSDIAVEWESNGQPENNYKTTPPVLDSDGSFFLYSKLTVDKSRWQQGNVFSCSVMHEALHNHYTQKSLSLSPG

SEQ ID NO: 196 - protein, 340 aa, Artificial Sequence
  source: /note="Description of Artificial Sequence: Synthetic anti-hHER2-HC-T256-GDSLSWLLRLLN-P257 polypeptide"
STKGPSVFPLAPSSKSTSGGTAALGCLVKDYFPEPVTVSWNSGALTSGVHTFPAVLQSSGLYSLSSVVTVPSSSLGTQTYICNVNHKPSNTKVDKKVEPKSCDKTHTCPPCPAPELLGGPSVFLFPPKPKDTLMISRTGDSLSWLLRLLNPEVTCVVVDVSHEDPEVKFNWYVDGVEVHNAKTKPREEQYNSTYRVVSVLTVLHQDWLNGKEYKCKVSNKALPAPIEKTISKAKGQPREPQVYTLPPSREEMTKNQVSLTCLVKGFYPSDIAVEWESNGQPENNYKTTPPVLDSDGSFFLYSKLTVDKSRWQQGNVFSCSVMHEALHNHYTQKSLSLSPG

SEQ ID NO: 197 - protein, 340 aa, Artificial Sequence
  source: /note="Description of Artificial Sequence: Synthetic anti-hHER2-HC-P257-GDSLSWLLRLLN-E258 polypeptide"
STKGPSVFPLAPSSKSTSGGTAALGCLVKDYFPEPVTVSWNSGALTSGVHTFPAVLQSSGLYSLSSVVTVPSSSLGTQTYICNVNHKPSNTKVDKKVEPKSCDKTHTCPPCPAPELLGGPSVFLFPPKPKDTLMISRTPGDSLSWLLRLLNEVTCVVVDVSHEDPEVKFNWYVDGVEVHNAKTKPREEQYNSTYRVVSVLTVLHQDWLNGKEYKCKVSNKALPAPIEKTISKAKGQPREPQVYTLPPSREEMTKNQVSLTCLVKGFYPSDIAVEWESNGQPENNYKTTPPVLDSDGSFFLYSKLTVDKSRWQQGNVFSCSVMHEALHNHYTQKSLSLSPG

SEQ ID NO: 198 - protein, 340 aa, Artificial Sequence
  source: /note="Description of Artificial Sequence: Synthetic anti-hHER2-HC-S267-GDSLSWLLRLLN-H268 polypeptide"
STKGPSVFPLAPSSKSTSGGTAALGCLVKDYFPEPVTVSWNSGALTSGVHTFPAVLQSSGLYSLSSVVTVPSSSLGTQTYICNVNHKPSNTKVDKKVEPKSCDKTHTCPPCPAPELLGGPSVFLFPPKPKDTLMISRTPEVTCVVVDVSGDSLSWLLRLLNHEDPEVKFNWYVDGVEVHNAKTKPREEQYNSTYRVVSVLTVLHQDWLNGKEYKCKVSNKALPAPIEKTISKAKGQPREPQVYTLPPSREEMTKNQVSLTCLVKGFYPSDIAVEWESNGQPENNYKTTPPVLDSDGSFFLYSKLTVDKSRWQQGNVFSCSVMHEALHNHYTQKSLSLSPG

SEQ ID NO: 199 - protein, 340 aa, Artificial Sequence
  source: /note="Description of Artificial Sequence: Synthetic anti-hHER2-HC-H268-GDSLSWLLRLLN-E269 polypeptide"
STKGPSVFPLAPSSKSTSGGTAALGCLVKDYFPEPVTVSWNSGALTSGVHTFPAVLQSSGLYSLSSVVTVPSSSLGTQTYICNVNHKPSNTKVDKKVEPKSCDKTHTCPPCPAPELLGGPSVFLFPPKPKDTLMISRTPEVTCVVVDVSHGDSLSWLLRLLNEDPEVKFNWYVDGVEVHNAKTKPREEQYNSTYRVVSVLTVLHQDWLNGKEYKCKVSNKALPAPIEKTISKAKGQPREPQVYTLPPSREEMTKNQVSLTCLVKGFYPSDIAVEWESNGQPENNYKTTPPVLDSDGSFFLYSKLTVDKSRWQQGNVFSCSVMHEALHNHYTQKSLSLSPG

SEQ ID NO: 200 - protein, 340 aa, Artificial Sequence
  source: /note="Description of Artificial Sequence: Synthetic anti-hHER2-HC-E269-GDSLSWLLRLLN-D270 polypeptide"
STKGPSVFPLAPSSKSTSGGTAALGCLVKDYFPEPVTVSWNSGALTSGVHTFPAVLQSSGLYSLSSVVTVPSSSLGTQTYICNVNHKPSNTKVDKKVEPKSCDKTHTCPPCPAPELLGGPSVFLFPPKPKDTLMISRTPEVTCVVVDVSHEGDSLSWLLRLLNDPEVKFNWYVDGVEVHNAKTKPREEQYNSTYRVVSVLTVLHQDWLNGKEYKCKVSNKALPAPIEKTISKAKGQPREPQVYTLPPSREEMTKNQVSLTCLVKGFYPSDIAVEWESNGQPENNYKTTPPVLDSDGSFFLYSKLTVDKSRWQQGNVFSCSVMHEALHNHYTQKSLSLSPG

SEQ ID NO: 201 - protein, 340 aa, Artificial Sequence
  source: /note="Description of Artificial Sequence: Synthetic anti-hHER2-HC-D270-GDSLSWLLRLLN-P271 polypeptide"
STKGPSVFPLAPSSKSTSGGTAALGCLVKDYFPEPVTVSWNSGALTSGVHTFPAVLQSSGLYSLSSVVTVPSSSLGTQTYICNVNHKPSNTKVDKKVEPKSCDKTHTCPPCPAPELLGGPSVFLFPPKPKDTLMISRTPEVTCVVVDVSHEDGDSLSWLLRLLNPEVKFNWYVDGVEVHNAKTKPREEQYNSTYRVVSVLTVLHQDWLNGKEYKCKVSNKALPAPIEKTISKAKGQPREPQVYTLPPSREEMTKNQVSLTCLVKGFYPSDIAVEWESNGQPENNYKTTPPVLDSDGSFFLYSKLTVDKSRWQQGNVFSCSVMHEALHNHYTQKSLSLSPG

SEQ ID NO: 202 - protein, 340 aa, Artificial Sequence
  source: /note="Description of Artificial Sequence: Synthetic anti-hHER2-HC-P271-GDSLSWLLRLLN-E272 polypeptide"
STKGPSVFPLAPSSKSTSGGTAALGCLVKDYFPEPVTVSWNSGALTSGVHTFPAVLQSSGLYSLSSVVTVPSSSLGTQTYICNVNHKPSNTKVDKKVEPKSCDKTHTCPPCPAPELLGGPSVFLFPPKPKDTLMISRTPEVTCVVVDVSHEDPGDSLSWLLRLLNEVKFNWYVDGVEVHNAKTKPREEQYNSTYRVVSVLTVLHQDWLNGKEYKCKVSNKALPAPIEKTISKAKGQPREPQVYTLPPSREEMTKNQVSLTCLVKGFYPSDIAVEWESNGQPENNYKTTPPVLDSDGSFFLYSKLTVDKSRWQQGNVFSCSVMHEALHNHYTQKSLSLSPG

SEQ ID NO: 203 - protein, 340 aa, Artificial Sequence
  source: /note="Description of Artificial Sequence: Synthetic anti-hHER2-HC-D280-GDSLSWLLRLLN-G281 polypeptide"
STKGPSVFPLAPSSKSTSGGTAALGCLVKDYFPEPVTVSWNSGALTSGVHTFPAVLQSSGLYSLSSVVTVPSSSLGTQTYICNVNHKPSNTKVDKKVEPKSCDKTHTCPPCPAPELLGGPSVFLFPPKPKDTLMISRTPEVTCVVVDVSHEDPEVKFNWYVDGDSLSWLLRLLNGVEVHNAKTKPREEQYNSTYRVVSVLTVLHQDWLNGKEYKCKVSNKALPAPIEKTISKAKGQPREPQVYTLPPSREEMTKNQVSLTCLVKGFYPSDIAVEWESNGQPENNYKTTPPVLDSDGSFFLYSKLTVDKSRWQQGNVFSCSVMHEALHNHYTQKSLSLSPG

SEQ ID NO: 204 - protein, 340 aa, Artificial Sequence
  source: /note="Description of Artificial Sequence: Synthetic anti-hHER2-HC-H285-GDSLSWLLRLLN-N286 polypeptide"
STKGPSVFPLAPSSKSTSGGTAALGCLVKDYFPEPVTVSWNSGALTSGVHTFPAVLQSSGLYSLSSVVTVPSSSLGTQTYICNVNHKPSNTKVDKKVEPKSCDKTHTCPPCPAPELLGGPSVFLFPPKPKDTLMISRTPEVTCVVVDVSHEDPEVKFNWYVDGVEVHGDSLSWLLRLLNNAKTKPREEQYNSTYRVVSVLTVLHQDWLNGKEYKCKVSNKALPAPIEKTISKAKGQPREPQVYTLPPSREEMTKNQVSLTCLVKGFYPSDIAVEWESNGQPENNYKTTPPVLDSDGSFFLYSKLTVDKSRWQQGNVFSCSVMHEALHNHYTQKSLSLSPG

SEQ ID NO: 205 - protein, 340 aa, Artificial Sequence
  source: /note="Description of Artificial Sequence: Synthetic anti-hHER2-HC-N286-GDSLSWLLRLLN-A287 polypeptide"
STKGPSVFPLAPSSKSTSGGTAALGCLVKDYFPEPVTVSWNSGALTSGVHTFPAVLQSSGLYSLSSVVTVPSSSLGTQTYICNVNHKPSNTKVDKKVEPKSCDKTHTCPPCPAPELLGGPSVFLFPPKPKDTLMISRTPEVTCVVVDVSHEDPEVKFNWYVDGVEVHNGDSLSWLLRLLNAKTKPREEQYNSTYRVVSVLTVLHQDWLNGKEYKCKVSNKALPAPIEKTISKAKGQPREPQVYTLPPSREEMTKNQVSLTCLVKGFYPSDIAVEWESNGQPENNYKTTPPVLDSDGSFFLYSKLTVDKSRWQQGNVFSCSVMHEALHNHYTQKSLSLSPG

SEQ ID NO: 206 - protein, 340 aa, Artificial Sequence
  source: /note="Description of Artificial Sequence: Synthetic anti-hHER2-HC-P291-GDSLSWLLRLLN-R292 polypeptide"
STKGPSVFPLAPSSKSTSGGTAALGCLVKDYFPEPVTVSWNSGALTSGVHTFPAVLQSSGLYSLSSVVTVPSSSLGTQTYICNVNHKPSNTKVDKKVEPKSCDKTHTCPPCPAPELLGGPSVFLFPPKPKDTLMISRTPEVTCVVVDVSHEDPEVKFNWYVDGVEVHNAKTKPGDSLSWLLRLLNREEQYNSTYRVVSVLTVLHQDWLNGKEYKCKVSNKALPAPIEKTISKAKGQPREPQVYTLPPSREEMTKNQVSLTCLVKGFYPSDIAVEWESNGQPENNYKTTPPVLDSDGSFFLYSKLTVDKSRWQQGNVFSCSVMHEALHNHYTQKSLSLSPG

SEQ ID NO: 207 - protein, 340 aa, Artificial Sequence
  source: /note="Description of Artificial Sequence: Synthetic anti-hHER2-HC-T307-GDSLSWLLRLLN-V308 polypeptide"
STKGPSVFPLAPSSKSTSGGTAALGCLVKDYFPEPVTVSWNSGALTSGVHTFPAVLQSSGLYSLSSVVTVPSSSLGTQTYICNVNHKPSNTKVDKKVEPKSCDKTHTCPPCPAPELLGGPSVFLFPPKPKDTLMISRTPEVTCVVVDVSHEDPEVKFNWYVDGVEVHNAKTKPREEQYNSTYRVVSVLTGDSLSWLLRLLNVLHQDWLNGKEYKCKVSNKALPAPIEKTISKAKGQPREPQVYTLPPSREEMTKNQVSLTCLVKGFYPSDIAVEWESNGQPENNYKTTPPVLDSDGSFFLYSKLTVDKSRWQQGNVFSCSVMHEALHNHYTQKSLSLSPG

SEQ ID NO: 208 - protein, 340 aa, Artificial Sequence
  source: /note="Description of Artificial Sequence: Synthetic anti-hHER2-HC-V308-GDSLSWLLRLLN-L309 polypeptide"
STKGPSVFPLAPSSKSTSGGTAALGCLVKDYFPEPVTVSWNSGALTSGVHTFPAVLQSSGLYSLSSVVTVPSSSLGTQTYICNVNHKPSNTKVDKKVEPKSCDKTHTCPPCPAPELLGGPSVFLFPPKPKDTLMISRTPEVTCVVVDVSHEDPEVKFNWYVDGVEVHNAKTKPREEQYNSTYRVVSVLTVGDSLSWLLRLLNLHQDWLNGKEYKCKVSNKALPAPIEKTISKAKGQPREPQVYTLPPSREEMTKNQVSLTCLVKGFYPSDIAVEWESNGQPENNYKTTPPVLDSDGSFFLYSKLTVDKSRWQQGNVFSCSVMHEALHNHYTQKSLSLSPG

SEQ ID NO: 209 - protein, 340 aa, Artificial Sequence
  source: /note="Description of Artificial Sequence: Synthetic anti-hHER2-HC-L309-GDSLSWLLRLLN-H310 polypeptide"
STKGPSVFPLAPSSKSTSGGTAALGCLVKDYFPEPVTVSWNSGALTSGVHTFPAVLQSSGLYSLSSVVTVPSSSLGTQTYICNVNHKPSNTKVDKKVEPKSCDKTHTCPPCPAPELLGGPSVFLFPPKPKDTLMISRTPEVTCVVVDVSHEDPEVKFNWYVDGVEVHNAKTKPREEQYNSTYRVVSVLTVLGDSLSWLLRLLNHQDWLNGKEYKCKVSNKALPAPIEKTISKAKGQPREPQVYTLPPSREEMTKNQVSLTCLVKGFYPSDIAVEWESNGQPENNYKTTPPVLDSDGSFFLYSKLTVDKSRWQQGNVFSCSVMHEALHNHYTQKSLSLSPG

SEQ ID NO: 210 - protein, 340 aa, Artificial Sequence
  source: /note="Description of Artificial Sequence: Synthetic anti-hHER2-HC-H310-GDSLSWLLRLLN-Q311 polypeptide"
STKGPSVFPLAPSSKSTSGGTAALGCLVKDYFPEPVTVSWNSGALTSGVHTFPAVLQSSGLYSLSSVVTVPSSSLGTQTYICNVNHKPSNTKVDKKVEPKSCDKTHTCPPCPAPELLGGPSVFLFPPKPKDTLMISRTPEVTCVVVDVSHEDPEVKFNWYVDGVEVHNAKTKPREEQYNSTYRVVSVLTVLHGDSLSWLLRLLNQDWLNGKEYKCKVSNKALPAPIEKTISKAKGQPREPQVYTLPPSREEMTKNQVSLTCLVKGFYPSDIAVEWESNGQPENNYKTTPPVLDSDGSFFLYSKLTVDKSRWQQGNVFSCSVMHEALHNHYTQKSLSLSPG

SEQ ID NO: 211 - protein, 340 aa, Artificial Sequence
  source: /note="Description of Artificial Sequence: Synthetic anti-hHER2-HC-N315-GDSLSWLLRLLN-G316 polypeptide"
STKGPSVFPLAPSSKSTSGGTAALGCLVKDYFPEPVTVSWNSGALTSGVHTFPAVLQSSGLYSLSSVVTVPSSSLGTQTYICNVNHKPSNTKVDKKVEPKSCDKTHTCPPCPAPELLGGPSVFLFPPKPKDTLMISRTPEVTCVVVDVSHEDPEVKFNWYVDGVEVHNAKTKPREEQYNSTYRVVSVLTVLHQDWLNGDSLSWLLRLLNGKEYKCKVSNKALPAPIEKTISKAKGQPREPQVYTLPPSREEMTKNQVSLTCLVKGFYPSDIAVEWESNGQPENNYKTTPPVLDSDGSFFLYSKLTVDKSRWQQGNVFSCSVMHEALHNHYTQKSLSLSPG

SEQ ID NO: 212 - protein, 340 aa, Artificial Sequence
  source: /note="Description of Artificial Sequence: Synthetic anti-hHER2-HC-G316-GDSLSWLLRLLN-K317 polypeptide"
STKGPSVFPLAPSSKSTSGGTAALGCLVKDYFPEPVTVSWNSGALTSGVHTFPAVLQSSGLYSLSSVVTVPSSSLGTQTYICNVNHKPSNTKVDKKVEPKSCDKTHTCPPCPAPELLGGPSVFLFPPKPKDTLMISRTPEVTCVVVDVSHEDPEVKFNWYVDGVEVHNAKTKPREEQYNSTYRVVSVLTVLHQDWLNGGDSLSWLLRLLNKEYKCKVSNKALPAPIEKTISKAKGQPREPQVYTLPPSREEMTKNQVSLTCLVKGFYPSDIAVEWESNGQPENNYKTTPPVLDSDGSFFLYSKLTVDKSRWQQGNVFSCSVMHEALHNHYTQKSLSLSPG

SEQ ID NO: 213 - protein, 340 aa, Artificial Sequence
  source: /note="Description of Artificial Sequence: Synthetic anti-hHER2-HC-K317-GDSLSWLLRLLN-E318 polypeptide"
STKGPSVFPLAPSSKSTSGGTAALGCLVKDYFPEPVTVSWNSGALTSGVHTFPAVLQSSGLYSLSSVVTVPSSSLGTQTYICNVNHKPSNTKVDKKVEPKSCDKTHTCPPCPAPELLGGPSVFLFPPKPKDTLMISRTPEVTCVVVDVSHEDPEVKFNWYVDGVEVHNAKTKPREEQYNSTYRVVSVLTVLHQDWLNGKGDSLSWLLRLLNEYKCKVSNKALPAPIEKTISKAKGQPREPQVYTLPPSREEMTKNQVSLTCLVKGFYPSDIAVEWESNGQPENNYKTTPPVLDSDGSFFLYSKLTVDKSRWQQGNVFSCSVMHEALHNHYTQKSLSLSPG

SEQ ID NO: 214 - protein, 340 aa, Artificial Sequence
  source: /note="Description of Artificial Sequence: Synthetic anti-hHER2-HC-K326-GDSLSWLLRLLN-A327 polypeptide"
STKGPSVFPLAPSSKSTSGGTAALGCLVKDYFPEPVTVSWNSGALTSGVHTFPAVLQSSGLYSLSSVVTVPSSSLGTQTYICNVNHKPSNTKVDKKVEPKSCDKTHTCPPCPAPELLGGPSVFLFPPKPKDTLMISRTPEVTCVVVDVSHEDPEVKFNWYVDGVEVHNAKTKPREEQYNSTYRVVSVLTVLHQDWLNGKEYKCKVSNKGDSLSWLLRLLNALPAPIEKTISKAKGQPREPQVYTLPPSREEMTKNQVSLTCLVKGFYPSDIAVEWESNGQPENNYKTTPPVLDSDGSFFLYSKLTVDKSRWQQGNVFSCSVMHEALHNHYTQKSLSLSPG

SEQ ID NO: 215 - protein, 340 aa, Artificial Sequence
  source: /note="Description of Artificial Sequence: Synthetic anti-hHER2-HC-A327-GDSLSWLLRLLN-L328 polypeptide"
STKGPSVFPLAPSSKSTSGGTAALGCLVKDYFPEPVTVSWNSGALTSGVHTFPAVLQSSGLYSLSSVVTVPSSSLGTQTYICNVNHKPSNTKVDKKVEPKSCDKTHTCPPCPAPELLGGPSVFLFPPKPKDTLMISRTPEVTCVVVDVSHEDPEVKFNWYVDGVEVHNAKTKPREEQYNSTYRVVSVLTVLHQDWLNGKEYKCKVSNKAGDSLSWLLRLLNLPAPIEKTISKAKGQPREPQVYTLPPSREEMTKNQVSLTCLVKGFYPSDIAVEWESNGQPENNYKTTPPVLDSDGSFFLYSKLTVDKSRWQQGNVFSCSVMHEALHNHYTQKSLSLSPG

SEQ ID NO: 216 - protein, 340 aa, Artificial Sequence
  source: /note="Description of Artificial Sequence: Synthetic anti-hHER2-HC-L328-GDSLSWLLRLLN-P329 polypeptide"
STKGPSVFPLAPSSKSTSGGTAALGCLVKDYFPEPVTVSWNSGALTSGVHTFPAVLQSSGLYSLSSVVTVPSSSLGTQTYICNVNHKPSNTKVDKKVEPKSCDKTHTCPPCPAPELLGGPSVFLFPPKPKDTLMISRTPEVTCVVVDVSHEDPEVKFNWYVDGVEVHNAKTKPREEQYNSTYRVVSVLTVLHQDWLNGKEYKCKVSNKALGDSLSWLLRLLNPAPIEKTISKAKGQPREPQVYTLPPSREEMTKNQVSLTCLVKGFYPSDIAVEWESNGQPENNYKTTPPVLDSDGSFFLYSKLTVDKSRWQQGNVFSCSVMHEALHNHYTQKSLSLSPG

SEQ ID NO: 217 - protein, 340 aa, Artificial Sequence
  source: /note="Description of Artificial Sequence: Synthetic anti-hHER2-HC-P329-GDSLSWLLRLLN-A330 polypeptide"
STKGPSVFPLAPSSKSTSGGTAALGCLVKDYFPEPVTVSWNSGALTSGVHTFPAVLQSSGLYSLSSVVTVPSSSLGTQTYICNVNHKPSNTKVDKKVEPKSCDKTHTCPPCPAPELLGGPSVFLFPPKPKDTLMISRTPEVTCVVVDVSHEDPEVKFNWYVDGVEVHNAKTKPREEQYNSTYRVVSVLTVLHQDWLNGKEYKCKVSNKALPGDSLSWLLRLLNAPIEKTISKAKGQPREPQVYTLPPSREEMTKNQVSLTCLVKGFYPSDIAVEWESNGQPENNYKTTPPVLDSDGSFFLYSKLTVDKSRWQQGNVFSCSVMHEALHNHYTQKSLSLSPG

SEQ ID NO: 218 - protein, 340 aa, Artificial Sequence
  source: /note="Description of Artificial Sequence: Synthetic anti-hHER2-HC-A330-GDSLSWLLRLLN-P331 polypeptide"
STKGPSVFPLAPSSKSTSGGTAALGCLVKDYFPEPVTVSWNSGALTSGVHTFPAVLQSSGLYSLSSVVTVPSSSLGTQTYICNVNHKPSNTKVDKKVEPKSCDKTHTCPPCPAPELLGGPSVFLFPPKPKDTLMISRTPEVTCVVVDVSHEDPEVKFNWYVDGVEVHNAKTKPREEQYNSTYRVVSVLTVLHQDWLNGKEYKCKVSNKALPAGDSLSWLLRLLNPIEKTISKAKGQPREPQVYTLPPSREEMTKNQVSLTCLVKGFYPSDIAVEWESNGQPENNYKTTPPVLDSDGSFFLYSKLTVDKSRWQQGNVFSCSVMHEALHNHYTQKSLSLSPG

SEQ ID NO: 219 - protein, 340 aa, Artificial Sequence
  source: /note="Description of Artificial Sequence: Synthetic anti-hHER2-HC-A339-GDSLSWLLRLLN-K340 polypeptide"
STKGPSVFPLAPSSKSTSGGTAALGCLVKDYFPEPVTVSWNSGALTSGVHTFPAVLQSSGLYSLSSVVTVPSSSLGTQTYICNVNHKPSNTKVDKKVEPKSCDKTHTCPPCPAPELLGGPSVFLFPPKPKDTLMISRTPEVTCVVVDVSHEDPEVKFNWYVDGVEVHNAKTKPREEQYNSTYRVVSVLTVLHQDWLNGKEYKCKVSNKALPAPIEKTISKAGDSLSWLLRLLNKGQPREPQVYTLPPSREEMTKNQVSLTCLVKGFYPSDIAVEWESNGQPENNYKTTPPVLDSDGSFFLYSKLTVDKSRWQQGNVFSCSVMHEALHNHYTQKSLSLSPG

SEQ ID NO: 220 - protein, 340 aa, Artificial Sequence
  source: /note="Description of Artificial Sequence: Synthetic anti-hHER2-HC-K340-GDSLSWLLRLLN-G341 polypeptide"
STKGPSVFPLAPSSKSTSGGTAALGCLVKDYFPEPVTVSWNSGALTSGVHTFPAVLQSSGLYSLSSVVTVPSSSLGTQTYICNVNHKPSNTKVDKKVEPKSCDKTHTCPPCPAPELLGGPSVFLFPPKPKDTLMISRTPEVTCVVVDVSHEDPEVKFNWYVDGVEVHNAKTKPREEQYNSTYRVVSVLTVLHQDWLNGKEYKCKVSNKALPAPIEKTISKAKGDSLSWLLRLLNGQPREPQVYTLPPSREEMTKNQVSLTCLVKGFYPSDIAVEWESNGQPENNYKTTPPVLDSDGSFFLYSKLTVDKSRWQQGNVFSCSVMHEALHNHYTQKSLSLSPG

SEQ ID NO: 221 - protein, 340 aa, Artificial Sequence
  source: /note="Description of Artificial Sequence: Synthetic anti-hHER2-HC-G341-GDSLSWLLRLLN-Q342 polypeptide"
STKGPSVFPLAPSSKSTSGGTAALGCLVKDYFPEPVTVSWNSGALTSGVHTFPAVLQSSGLYSLSSVVTVPSSSLGTQTYICNVNHKPSNTKVDKKVEPKSCDKTHTCPPCPAPELLGGPSVFLFPPKPKDTLMISRTPEVTCVVVDVSHEDPEVKFNWYVDGVEVHNAKTKPREEQYNSTYRVVSVLTVLHQDWLNGKEYKCKVSNKALPAPIEKTISKAKGGDSLSWLLRLLNQPREPQVYTLPPSREEMTKNQVSLTCLVKGFYPSDIAVEWESNGQPENNYKTTPPVLDSDGSFFLYSKLTVDKSRWQQGNVFSCSVMHEALHNHYTQKSLSLSPG

SEQ ID NO: 222 - protein, 340 aa, Artificial Sequence
  source: /note="Description of Artificial Sequence: Synthetic anti-hHER2-HC-Q342-GDSLSWLLRLLN-P343 polypeptide"
STKGPSVFPLAPSSKSTSGGTAALGCLVKDYFPEPVTVSWNSGALTSGVHTFPAVLQSSGLYSLSSVVTVPSSSLGTQTYICNVNHKPSNTKVDKKVEPKSCDKTHTCPPCPAPELLGGPSVFLFPPKPKDTLMISRTPEVTCVVVDVSHEDPEVKFNWYVDGVEVHNAKTKPREEQYNSTYRVVSVLTVLHQDWLNGKEYKCKVSNKALPAPIEKTISKAKGQGDSLSWLLRLLNPREPQVYTLPPSREEMTKNQVSLTCLVKGFYPSDIAVEWESNGQPENNYKTTPPVLDSDGSFFLYSKLTVDKSRWQQGNVFSCSVMHEALHNHYTQKSLSLSPG

SEQ ID NO: 223 - protein, 340 aa, Artificial Sequence
  source: /note="Description of Artificial Sequence: Synthetic anti-hHER2-HC-P343-GDSLSWLLRLLN-R344 polypeptide"
STKGPSVFPLAPSSKSTSGGTAALGCLVKDYFPEPVTVSWNSGALTSGVHTFPAVLQSSGLYSLSSVVTVPSSSLGTQTYICNVNHKPSNTKVDKKVEPKSCDKTHTCPPCPAPELLGGPSVFLFPPKPKDTLMISRTPEVTCVVVDVSHEDPEVKFNWYVDGVEVHNAKTKPREEQYNSTYRVVSVLTVLHQDWLNGKEYKCKVSNKALPAPIEKTISKAKGQPGDSLSWLLRLLNREPQVYTLPPSREEMTKNQVSLTCLVKGFYPSDIAVEWESNGQPENNYKTTPPVLDSDGSFFLYSKLTVDKSRWQQGNVFSCSVMHEALHNHYTQKSLSLSPG

SEQ ID NO: 224 - protein, 340 aa, Artificial Sequence
  source: /note="Description of Artificial Sequence: Synthetic anti-hHER2-HC-R344-GDSLSWLLRLLN-E345 polypeptide"
STKGPSVFPLAPSSKSTSGGTAALGCLVKDYFPEPVTVSWNSGALTSGVHTFPAVLQSSGLYSLSSVVTVPSSSLGTQTYICNVNHKPSNTKVDKKVEPKSCDKTHTCPPCPAPELLGGPSVFLFPPKPKDTLMISRTPEVTCVVVDVSHEDPEVKFNWYVDGVEVHNAKTKPREEQYNSTYRVVSVLTVLHQDWLNGKEYKCKVSNKALPAPIEKTISKAKGQPRGDSLSWLLRLLNEPQVYTLPPSREEMTKNQVSLTCLVKGFYPSDIAVEWESNGQPENNYKTTPPVLDSDGSFFLYSKLTVDKSRWQQGNVFSCSVMHEALHNHYTQKSLSLSPG

SEQ ID NO: 225 - protein, 340 aa, Artificial Sequence
  source: /note="Description of Artificial Sequence: Synthetic anti-hHER2-HC-R355-GDSLSWLLRLLN-E356 polypeptide"
STKGPSVFPLAPSSKSTSGGTAALGCLVKDYFPEPVTVSWNSGALTSGVHTFPAVLQSSGLYSLSSVVTVPSSSLGTQTYICNVNHKPSNTKVDKKVEPKSCDKTHTCPPCPAPELLGGPSVFLFPPKPKDTLMISRTPEVTCVVVDVSHEDPEVKFNWYVDGVEVHNAKTKPREEQYNSTYRVVSVLTVLHQDWLNGKEYKCKVSNKALPAPIEKTISKAKGQPREPQVYTLPPSRGDSLSWLLRLLNEEMTKNQVSLTCLVKGFYPSDIAVEWESNGQPENNYKTTPPVLDSDGSFFLYSKLTVDKSRWQQGNVFSCSVMHEALHNHYTQKSLSLSPG

SEQ ID NO: 226 - protein, 340 aa, Artificial Sequence
  source: /note="Description of Artificial Sequence: Synthetic anti-hHER2-HC-E356-GDSLSWLLRLLN-E357 polypeptide"
STKGPSVFPLAPSSKSTSGGTAALGCLVKDYFPEPVTVSWNSGALTSGVHTFPAVLQSSGLYSLSSVVTVPSSSLGTQTYICNVNHKPSNTKVDKKVEPKSCDKTHTCPPCPAPELLGGPSVFLFPPKPKDTLMISRTPEVTCVVVDVSHEDPEVKFNWYVDGVEVHNAKTKPREEQYNSTYRVVSVLTVLHQDWLNGKEYKCKVSNKALPAPIEKTISKAKGQPREPQVYTLPPSREGDSLSWLLRLLNEMTKNQVSLTCLVKGFYPSDIAVEWESNGQPENNYKTTPPVLDSDGSFFLYSKLTVDKSRWQQGNVFSCSVMHEALHNHYTQKSLSLSPG

SEQ ID NO: 227 - protein, 340 aa, Artificial Sequence
  source: /note="Description of Artificial Sequence: Synthetic anti-hHER2-HC-E357-GDSLSWLLRLLN-M358 polypeptide"
STKGPSVFPLAPSSKSTSGGTAALGCLVKDYFPEPVTVSWNSGALTSGVHTFPAVLQSSGLYSLSSVVTVPSSSLGTQTYICNVNHKPSNTKVDKKVEPKSCDKTHTCPPCPAPELLGGPSVFLFPPKPKDTLMISRTPEVTCVVVDVSHEDPEVKFNWYVDGVEVHNAKTKPREEQYNSTYRVVSVLTVLHQDWLNGKEYKCKVSNKALPAPIEKTISKAKGQPREPQVYTLPPSREEGDSLSWLLRLLNMTKNQVSLTCLVKGFYPSDIAVEWESNGQPENNYKTTPPVLDSDGSFFLYSKLTVDKSRWQQGNVFSCSVMHEALHNHYTQKSLSLSPG

SEQ ID NO: 228 - protein, 340 aa, Artificial Sequence
  source: /note="Description of Artificial Sequence: Synthetic anti-hHER2-HC-M358-GDSLSWLLRLLN-T359 polypeptide"
STKGPSVFPLAPSSKSTSGGTAALGCLVKDYFPEPVTVSWNSGALTSGVHTFPAVLQSSGLYSLSSVVTVPSSSLGTQTYICNVNHKPSNTKVDKKVEPKSCDKTHTCPPCPAPELLGGPSVFLFPPKPKDTLMISRTPEVTCVVVDVSHEDPEVKFNWYVDGVEVHNAKTKPREEQYNSTYRVVSVLTVLHQDWLNGKEYKCKVSNKALPAPIEKTISKAKGQPREPQVYTLPPSREEMGDSLSWLLRLLNTKNQVSLTCLVKGFYPSDIAVEWESNGQPENNYKTTPPVLDSDGSFFLYSKLTVDKSRWQQGNVFSCSVMHEALHNHYTQKSLSLSPG

SEQ ID NO: 229 - protein, 340 aa, Artificial Sequence
  source: /note="Description of Artificial Sequence: Synthetic anti-hHER2-HC-K360-GDSLSWLLRLLN-N361 polypeptide"
STKGPSVFPLAPSSKSTSGGTAALGCLVKDYFPEPVTVSWNSGALTSGVHTFPAVLQSSGLYSLSSVVTVPSSSLGTQTYICNVNHKPSNTKVDKKVEPKSCDKTHTCPPCPAPELLGGPSVFLFPPKPKDTLMISRTPEVTCVVVDVSHEDPEVKFNWYVDGVEVHNAKTKPREEQYNSTYRVVSVLTVLHQDWLNGKEYKCKVSNKALPAPIEKTISKAKGQPREPQVYTLPPSREEMTKGDSLSWLLRLLNNQVSLTCLVKGFYPSDIAVEWESNGQPENNYKTTPPVLDSDGSFFLYSKLTVDKSRWQQGNVFSCSVMHEALHNHYTQKSLSLSPG

SEQ ID NO: 230 - protein, 340 aa, Artificial Sequence
  source: /note="Description of Artificial Sequence: Synthetic anti-hHER2-HC-N384-GDSLSWLLRLLN-G385 polypeptide"
STKGPSVFPLAPSSKSTSGGTAALGCLVKDYFPEPVTVSWNSGALTSGVHTFPAVLQSSGLYSLSSVVTVPSSSLGTQTYICNVNHKPSNTKVDKKVEPKSCDKTHTCPPCPAPELLGGPSVFLFPPKPKDTLMISRTPEVTCVVVDVSHEDPEVKFNWYVDGVEVHNAKTKPREEQYNSTYRVVSVLTVLHQDWLNGKEYKCKVSNKALPAPIEKTISKAKGQPREPQVYTLPPSREEMTKNQVSLTCLVKGFYPSDIAVEWESNGDSLSWLLRLLNGQPENNYKTTPPVLDSDGSFFLYSKLTVDKSRWQQGNVFSCSVMHEALHNHYTQKSLSLSPG

SEQ ID NO: 231 - protein, 340 aa, Artificial Sequence
  source: /note="Description of Artificial Sequence: Synthetic anti-hHER2-HC-N389-GDSLSWLLRLLN-N390 polypeptide"
STKGPSVFPLAPSSKSTSGGTAALGCLVKDYFPEPVTVSWNSGALTSGVHTFPAVLQSSGLYSLSSVVTVPSSSLGTQTYICNVNHKPSNTKVDKKVEPKSCDKTHTCPPCPAPELLGGPSVFLFPPKPKDTLMISRTPEVTCVVVDVSHEDPEVKFNWYVDGVEVHNAKTKPREEQYNSTYRVVSVLTVLHQDWLNGKEYKCKVSNKALPAPIEKTISKAKGQPREPQVYTLPPSREEMTKNQVSLTCLVKGFYPSDIAVEWESNGQPENGDSLSWLLRLLNNYKTTPPVLDSDGSFFLYSKLTVDKSRWQQGNVFSCSVMHEALHNHYTQKSLSLSPG

SEQ ID NO: 232 - protein, 340 aa, Artificial Sequence
  source: /note="Description of Artificial Sequence: Synthetic anti-hHER2-HC-T394-GDSLSWLLRLLN-P395 polypeptide"
STKGPSVFPLAPSSKSTSGGTAALGCLVKDYFPEPVTVSWNSGALTSGVHTFPAVLQSSGLYSLSSVVTVPSSSLGTQTYICNVNHKPSNTKVDKKVEPKSCDKTHTCPPCPAPELLGGPSVFLFPPKPKDTLMISRTPEVTCVVVDVSHEDPEVKFNWYVDGVEVHNAKTKPREEQYNSTYRVVSVLTVLHQDWLNGKEYKCKVSNKALPAPIEKTISKAKGQPREPQVYTLPPSREEMTKNQVSLTCLVKGFYPSDIAVEWESNGQPENNYKTTGDSLSWLLRLLNPPVLDSDGSFFLYSKLTVDKSRWQQGNVFSCSVMHEALHNHYTQKSLSLSPG

SEQ ID NO: 233 - protein, 340 aa, Artificial Sequence
  source: /note="Description of Artificial Sequence: Synthetic anti-hHER2-HC-P395-GDSLSWLLRLLN-P396 polypeptide"
STKGPSVFPLAPSSKSTSGGTAALGCLVKDYFPEPVTVSWNSGALTSGVHTFPAVLQSSGLYSLSSVVTVPSSSLGTQTYICNVNHKPSNTKVDKKVEPKSCDKTHTCPPCPAPELLGGPSVFLFPPKPKDTLMISRTPEVTCVVVDVSHEDPEVKFNWYVDGVEVHNAKTKPREEQYNSTYRVVSVLTVLHQDWLNGKEYKCKVSNKALPAPIEKTISKAKGQPREPQVYTLPPSREEMTKNQVSLTCLVKGFYPSDIAVEWESNGQPENNYKTTPGDSLSWLLRLLNPVLDSDGSFFLYSKLTVDKSRWQQGNVFSCSVMHEALHNHYTQKSLSLSPG

SEQ ID NO: 234 - protein, 340 aa, Artificial Sequence
  source: /note="Description of Artificial Sequence: Synthetic anti-hHER2-HC-D399-GDSLSWLLRLLN-S400 polypeptide"
STKGPSVFPLAPSSKSTSGGTAALGCLVKDYFPEPVTVSWNSGALTSGVHTFPAVLQSSGLYSLSSVVTVPSSSLGTQTYICNVNHKPSNTKVDKKVEPKSCDKTHTCPPCPAPELLGGPSVFLFPPKPKDTLMISRTPEVTCVVVDVSHEDPEVKFNWYVDGVEVHNAKTKPREEQYNSTYRVVSVLTVLHQDWLNGKEYKCKVSNKALPAPIEKTISKAKGQPREPQVYTLPPSREEMTKNQVSLTCLVKGFYPSDIAVEWESNGQPENNYKTTPPVLDGDSLSWLLRLLNSDGSFFLYSKLTVDKSRWQQGNVFSCSVMHEALHNHYTQKSLSLSPG

SEQ ID NO: 235 - protein, 340 aa, Artificial Sequence
  source: /note="Description of Artificial Sequence: Synthetic anti-hHER2-HC-D401-GDSLSWLLRLLN-G402 polypeptide"
STKGPSVFPLAPSSKSTSGGTAALGCLVKDYFPEPVTVSWNSGALTSGVHTFPAVLQSSGLYSLSSVVTVPSSSLGTQTYICNVNHKPSNTKVDKKVEPKSCDKTHTCPPCPAPELLGGPSVFLFPPKPKDTLMISRTPEVTCVVVDVSHEDPEVKFNWYVDGVEVHNAKTKPREEQYNSTYRVVSVLTVLHQDWLNGKEYKCKVSNKALPAPIEKTISKAKGQPREPQVYTLPPSREEMTKNQVSLTCLVKGFYPSDIAVEWESNGQPENNYKTTPPVLDSDGDSLSWLLRLLNGSFFLYSKLTVDKSRWQQGNVFSCSVMHEALHNHYTQKSLSLSPG

SEQ ID NO: 236 - protein, 340 aa, Artificial Sequence
  source: /note="Description of Artificial Sequence: Synthetic anti-hHER2-HC-S415-GDSLSWLLRLLN-R416 polypeptide"
STKGPSVFPLAPSSKSTSGGTAALGCLVKDYFPEPVTVSWNSGALTSGVHTFPAVLQSSGLYSLSSVVTVPSSSLGTQTYICNVNHKPSNTKVDKKVEPKSCDKTHTCPPCPAPELLGGPSVFLFPPKPKDTLMISRTPEVTCVVVDVSHEDPEVKFNWYVDGVEVHNAKTKPREEQYNSTYRVVSVLTVLHQDWLNGKEYKCKVSNKALPAPIEKTISKAKGQPREPQVYTLPPSREEMTKNQVSLTCLVKGFYPSDIAVEWESNGQPENNYKTTPPVLDSDGSFFLYSKLTVDKSGDSLSWLLRLLNRWQQGNVFSCSVMHEALHNHYTQKSLSLSPG

SEQ ID NO: 237 - protein, 340 aa, Artificial Sequence
  source: /note="Description of Artificial Sequence: Synthetic anti-hHER2-HC-R416-GDSLSWLLRLLN-W417 polypeptide"
STKGPSVFPLAPSSKSTSGGTAALGCLVKDYFPEPVTVSWNSGALTSGVHTFPAVLQSSGLYSLSSVVTVPSSSLGTQTYICNVNHKPSNTKVDKKVEPKSCDKTHTCPPCPAPELLGGPSVFLFPPKPKDTLMISRTPEVTCVVVDVSHEDPEVKFNWYVDGVEVHNAKTKPREEQYNSTYRVVSVLTVLHQDWLNGKEYKCKVSNKALPAPIEKTISKAKGQPREPQVYTLPPSREEMTKNQVSLTCLVKGFYPSDIAVEWESNGQPENNYKTTPPVLDSDGSFFLYSKLTVDKSRGDSLSWLLRLLNWQQGNVFSCSVMHEALHNHYTQKSLSLSPG

SEQ ID NO: 238 - protein, 340 aa, Artificial Sequence
  source: /note="Description of Artificial Sequence: Synthetic anti-hHER2-HC-W417-GDSLSWLLRLLN-Q418 polypeptide"
STKGPSVFPLAPSSKSTSGGTAALGCLVKDYFPEPVTVSWNSGALTSGVHTFPAVLQSSGLYSLSSVVTVPSSSLGTQTYICNVNHKPSNTKVDKKVEPKSCDKTHTCPPCPAPELLGGPSVFLFPPKPKDTLMISRTPEVTCVVVDVSHEDPEVKFNWYVDGVEVHNAKTKPREEQYNSTYRVVSVLTVLHQDWLNGKEYKCKVSNKALPAPIEKTISKAKGQPREPQVYTLPPSREEMTKNQVSLTCLVKGFYPSDIAVEWESNGQPENNYKTTPPVLDSDGSFFLYSKLTVDKSRWGDSLSWLLRLLNQQGNVFSCSVMHEALHNHYTQKSLSLSPG

SEQ ID NO: 239 - protein, 340 aa, Artificial Sequence
  source: /note="Description of Artificial Sequence: Synthetic anti-hHER2-HC-Q418-GDSLSWLLRLLN-Q419 polypeptide"
STKGPSVFPLAPSSKSTSGGTAALGCLVKDYFPEPVTVSWNSGALTSGVHTFPAVLQSSGLYSLSSVVTVPSSSLGTQTYICNVNHKPSNTKVDKKVEPKSCDKTHTCPPCPAPELLGGPSVFLFPPKPKDTLMISRTPEVTCVVVDVSHEDPEVKFNWYVDGVEVHNAKTKPREEQYNSTYRVVSVLTVLHQDWLNGKEYKCKVSNKALPAPIEKTISKAKGQPREPQVYTLPPSREEMTKNQVSLTCLVKGFYPSDIAVEWESNGQPENNYKTTPPVLDSDGSFFLYSKLTVDKSRWQGDSLSWLLRLLNQGNVFSCSVMHEALHNHYTQKSLSLSPG

SEQ ID NO: 240 - protein, 340 aa, Artificial Sequence
  source: /note="Description of Artificial Sequence: Synthetic anti-hHER2-HC-Q419-GDSLSWLLRLLN-G420 polypeptide"
STKGPSVFPLAPSSKSTSGGTAALGCLVKDYFPEPVTVSWNSGALTSGVHTFPAVLQSSGLYSLSSVVTVPSSSLGTQTYICNVNHKPSNTKVDKKVEPKSCDKTHTCPPCPAPELLGGPSVFLFPPKPKDTLMISRTPEVTCVVVDVSHEDPEVKFNWYVDGVEVHNAKTKPREEQYNSTYRVVSVLTVLHQDWLNGKEYKCKVSNKALPAPIEKTISKAKGQPREPQVYTLPPSREEMTKNQVSLTCLVKGFYPSDIAVEWESNGQPENNYKTTPPVLDSDGSFFLYSKLTVDKSRWQQGDSLSWLLRLLNGNVFSCSVMHEALHNHYTQKSLSLSPG

SEQ ID NO: 241 - protein, 340 aa, Artificial Sequence
  source: /note="Description of Artificial Sequence: Synthetic anti-hHER2-HC-G420-GDSLSWLLRLLN-N421 polypeptide"
STKGPSVFPLAPSSKSTSGGTAALGCLVKDYFPEPVTVSWNSGALTSGVHTFPAVLQSSGLYSLSSVVTVPSSSLGTQTYICNVNHKPSNTKVDKKVEPKSCDKTHTCPPCPAPELLGGPSVFLFPPKPKDTLMISRTPEVTCVVVDVSHEDPEVKFNWYVDGVEVHNAKTKPREEQYNSTYRVVSVLTVLHQDWLNGKEYKCKVSNKALPAPIEKTISKAKGQPREPQVYTLPPSREEMTKNQVSLTCLVKGFYPSDIAVEWESNGQPENNYKTTPPVLDSDGSFFLYSKLTVDKSRWQQGGDSLSWLLRLLNNVFSCSVMHEALHNHYTQKSLSLSPG

SEQ ID NO: 242 - protein, 340 aa, Artificial Sequence
  source: /note="Description of Artificial Sequence: Synthetic anti-hHER2-HC-N421-GDSLSWLLRLLN-V422 polypeptide"
STKGPSVFPLAPSSKSTSGGTAALGCLVKDYFPEPVTVSWNSGALTSGVHTFPAVLQSSGLYSLSSVVTVPSSSLGTQTYICNVNHKPSNTKVDKKVEPKSCDKTHTCPPCPAPELLGGPSVFLFPPKPKDTLMISRTPEVTCVVVDVSHEDPEVKFNWYVDGVEVHNAKTKPREEQYNSTYRVVSVLTVLHQDWLNGKEYKCKVSNKALPAPIEKTISKAKGQPREPQVYTLPPSREEMTKNQVSLTCLVKGFYPSDIAVEWESNGQPENNYKTTPPVLDSDGSFFLYSKLTVDKSRWQQGNGDSLSWLLRLLNVFSCSVMHEALHNHYTQKSLSLSPG

SEQ ID NO: 243 - protein, 340 aa, Artificial Sequence
  source: /note="Description of Artificial Sequence: Synthetic anti-hHER2-HC-H433-GDSLSWLLRLLN-N434 polypeptide"
STKGPSVFPLAPSSKSTSGGTAALGCLVKDYFPEPVTVSWNSGALTSGVHTFPAVLQSSGLYSLSSVVTVPSSSLGTQTYICNVNHKPSNTKVDKKVEPKSCDKTHTCPPCPAPELLGGPSVFLFPPKPKDTLMISRTPEVTCVVVDVSHEDPEVKFNWYVDGVEVHNAKTKPREEQYNSTYRVVSVLTVLHQDWLNGKEYKCKVSNKALPAPIEKTISKAKGQPREPQVYTLPPSREEMTKNQVSLTCLVKGFYPSDIAVEWESNGQPENNYKTTPPVLDSDGSFFLYSKLTVDKSRWQQGNVFSCSVMHEALHGDSLSWLLRLLNNHYTQKSLSLSPG

SEQ ID NO: 244 - protein, 340 aa, Artificial Sequence
  source: /note="Description of Artificial Sequence: Synthetic anti-hHER2-HC-N434-GDSLSWLLRLLN-H435 polypeptide"
STKGPSVFPLAPSSKSTSGGTAALGCLVKDYFPEPVTVSWNSGALTSGVHTFPAVLQSSGLYSLSSVVTVPSSSLGTQTYICNVNHKPSNTKVDKKVEPKSCDKTHTCPPCPAPELLGGPSVFLFPPKPKDTLMISRTPEVTCVVVDVSHEDPEVKFNWYVDGVEVHNAKTKPREEQYNSTYRVVSVLTVLHQDWLNGKEYKCKVSNKALPAPIEKTISKAKGQPREPQVYTLPPSREEMTKNQVSLTCLVKGFYPSDIAVEWESNGQPENNYKTTPPVLDSDGSFFLYSKLTVDKSRWQQGNVFSCSVMHEALHNGDSLSWLLRLLNHYTQKSLSLSPG

SEQ ID NO: 245 - protein, 340 aa, Artificial Sequence
  source: /note="Description of Artificial Sequence: Synthetic anti-hHER2-HC-S442-GDSLSWLLRLLN-L443 polypeptide"
STKGPSVFPLAPSSKSTSGGTAALGCLVKDYFPEPVTVSWNSGALTSGVHTFPAVLQSSGLYSLSSVVTVPSSSLGTQTYICNVNHKPSNTKVDKKVEPKSCDKTHTCPPCPAPELLGGPSVFLFPPKPKDTLMISRTPEVTCVVVDVSHEDPEVKFNWYVDGVEVHNAKTKPREEQYNSTYRVVSVLTVLHQDWLNGKEYKCKVSNKALPAPIEKTISKAKGQPREPQVYTLPPSREEMTKNQVSLTCLVKGFYPSDIAVEWESNGQPENNYKTTPPVLDSDGSFFLYSKLTVDKSRWQQGNVFSCSVMHEALHNHYTQKSLSGDSLSWLLRLLNLSPG

SEQ ID NO: 246 - protein, 340 aa, Artificial Sequence
  source: /note="Description of Artificial Sequence: Synthetic anti-hHER2-HC-L443-GDSLSWLLRLLN-S444 polypeptide"
STKGPSVFPLAPSSKSTSGGTAALGCLVKDYFPEPVTVSWNSGALTSGVHTFPAVLQSSGLYSLSSVVTVPSSSLGTQTYICNVNHKPSNTKVDKKVEPKSCDKTHTCPPCPAPELLGGPSVFLFPPKPKDTLMISRTPEVTCVVVDVSHEDPEVKFNWYVDGVEVHNAKTKPREEQYNSTYRVVSVLTVLHQDWLNGKEYKCKVSNKALPAPIEKTISKAKGQPREPQVYTLPPSREEMTKNQVSLTCLVKGFYPSDIAVEWESNGQPENNYKTTPPVLDSDGSFFLYSKLTVDKSRWQQGNVFSCSVMHEALHNHYTQKSLSLGDSLSWLLRLLNSPG

SEQ ID NO: 247 - protein, 340 aa, Artificial Sequence
  source: /note="Description of Artificial Sequence: Synthetic anti-hHER2-HC-S444-GDSLSWLLRLLN-P445 polypeptide"
STKGPSVFPLAPSSKSTSGGTAALGCLVKDYFPEPVTVSWNSGALTSGVHTFPAVLQSSGLYSLSSVVTVPSSSLGTQTYICNVNHKPSNTKVDKKVEPKSCDKTHTCPPCPAPELLGGPSVFLFPPKPKDTLMISRTPEVTCVVVDVSHEDPEVKFNWYVDGVEVHNAKTKPREEQYNSTYRVVSVLTVLHQDWLNGKEYKCKVSNKALPAPIEKTISKAKGQPREPQVYTLPPSREEMTKNQVSLTCLVKGFYPSDIAVEWESNGQPENNYKTTPPVLDSDGSFFLYSKLTVDKSRWQQGNVFSCSVMHEALHNHYTQKSLSLSGDSLSWLLRLLNPG

SEQ ID NO: 248 - protein, 340 aa, Artificial Sequence
  source: /note="Description of Artificial Sequence: Synthetic anti-hHER2-HC-P445-GDSLSWLLRLLN-G446 polypeptide"
STKGPSVFPLAPSSKSTSGGTAALGCLVKDYFPEPVTVSWNSGALTSGVHTFPAVLQSSGLYSLSSVVTVPSSSLGTQTYICNVNHKPSNTKVDKKVEPKSCDKTHTCPPCPAPELLGGPSVFLFPPKPKDTLMISRTPEVTCVVVDVSHEDPEVKFNWYVDGVEVHNAKTKPREEQYNSTYRVVSVLTVLHQDWLNGKEYKCKVSNKALPAPIEKTISKAKGQPREPQVYTLPPSREEMTKNQVSLTCLVKGFYPSDIAVEWESNGQPENNYKTTPPVLDSDGSFFLYSKLTVDKSRWQQGNVFSCSVMHEALHNHYTQKSLSLSPGDSLSWLLRLLNG

SEQ ID NO: 249 - protein, 339 aa, Artificial Sequence
  source: /note="Description of Artificial Sequence: Synthetic anti-hHER2-HC-A118-DSLEFIASKLA-S119 polypeptide"
DSLEFIASKLASTKGPSVFPLAPSSKSTSGGTAALGCLVKDYFPEPVTVSWNSGALTSGVHTFPAVLQSSGLYSLSSVVTVPSSSLGTQTYICNVNHKPSNTKVDKKVEPKSCDKTHTCPPCPAPELLGGPSVFLFPPKPKDTLMISRTPEVTCVVVDVSHEDPEVKFNWYVDGVEVHNAKTKPREEQYNSTYRVVSVLTVLHQDWLNGKEYKCKVSNKALPAPIEKTISKAKGQPREPQVYTLPPSREEMTKNQVSLTCLVKGFYPSDIAVEWESNGQPENNYKTTPPVLDSDGSFFLYSKLTVDKSRWQQGNVFSCSVMHEALHNHYTQKSLSLSPG

SEQ ID NO: 250 - protein, 339 aa, Artificial Sequence
  source: /note="Description of Artificial Sequence: Synthetic anti-hHER2-HC-S119-DSLEFIASKLA-T120 polypeptide"
SDSLEFIASKLATKGPSVFPLAPSSKSTSGGTAALGCLVKDYFPEPVTVSWNSGALTSGVHTFPAVLQSSGLYSLSSVVTVPSSSLGTQTYICNVNHKPSNTKVDKKVEPKSCDKTHTCPPCPAPELLGGPSVFLFPPKPKDTLMISRTPEVTCVVVDVSHEDPEVKFNWYVDGVEVHNAKTKPREEQYNSTYRVVSVLTVLHQDWLNGKEYKCKVSNKALPAPIEKTISKAKGQPREPQVYTLPPSREEMTKNQVSLTCLVKGFYPSDIAVEWESNGQPENNYKTTPPVLDSDGSFFLYSKLTVDKSRWQQGNVFSCSVMHEALHNHYTQKSLSLSPG

SEQ ID NO: 251 - protein, 339 aa, Artificial Sequence
  source: /note="Description of Artificial Sequence: Synthetic anti-hHER2-HC-T120-DSLEFIASKLA-K121 polypeptide"
STDSLEFIASKLAKGPSVFPLAPSSKSTSGGTAALGCLVKDYFPEPVTVSWNSGALTSGVHTFPAVLQSSGLYSLSSVVTVPSSSLGTQTYICNVNHKPSNTKVDKKVEPKSCDKTHTCPPCPAPELLGGPSVFLFPPKPKDTLMISRTPEVTCVVVDVSHEDPEVKFNWYVDGVEVHNAKTKPREEQYNSTYRVVSVLTVLHQDWLNGKEYKCKVSNKALPAPIEKTISKAKGQPREPQVYTLPPSREEMTKNQVSLTCLVKGFYPSDIAVEWESNGQPENNYKTTPPVLDSDGSFFLYSKLTVDKSRWQQGNVFSCSVMHEALHNHYTQKSLSLSPG

SEQ ID NO: 252 - protein, 339 aa, Artificial Sequence
  source: /note="Description of Artificial Sequence: Synthetic anti-hHER2-HC-S131-DSLEFIASKLA-S132 polypeptide"
STKGPSVFPLAPSDSLEFIASKLASKSTSGGTAALGCLVKDYFPEPVTVSWNSGALTSGVHTFPAVLQSSGLYSLSSVVTVPSSSLGTQTYICNVNHKPSNTKVDKKVEPKSCDKTHTCPPCPAPELLGGPSVFLFPPKPKDTLMISRTPEVTCVVVDVSHEDPEVKFNWYVDGVEVHNAKTKPREEQYNSTYRVVSVLTVLHQDWLNGKEYKCKVSNKALPAPIEKTISKAKGQPREPQVYTLPPSREEMTKNQVSLTCLVKGFYPSDIAVEWESNGQPENNYKTTPPVLDSDGSFFLYSKLTVDKSRWQQGNVFSCSVMHEALHNHYTQKSLSLSPG

SEQ ID NO: 253 - protein, 339 aa, Artificial Sequence
  source: /note="Description of Artificial Sequence: Synthetic anti-hHER2-HC-S132-DSLEFIASKLA-K133 polypeptide"
STKGPSVFPLAPSSDSLEFIASKLAKSTSGGTAALGCLVKDYFPEPVTVSWNSGALTSGVHTFPAVLQSSGLYSLSSVVTVPSSSLGTQTYICNVNHKPSNTKVDKKVEPKSCDKTHTCPPCPAPELLGGPSVFLFPPKPKDTLMISRTPEVTCVVVDVSHEDPEVKFNWYVDGVEVHNAKTKPREEQYNSTYRVVSVLTVLHQDWLNGKEYKCKVSNKALPAPIEKTISKAKGQPREPQVYTLPPSREEMTKNQVSLTCLVKGFYPSDIAVEWESNGQPENNYKTTPPVLDSDGSFFLYSKLTVDKSRWQQGNVFSCSVMHEALHNHYTQKSLSLSPG

SEQ ID NO: 254 - protein, 339 aa, Artificial Sequence
  source: /note="Description of Artificial Sequence: Synthetic anti-hHER2-HC-K133-DSLEFIASKLA-S134 polypeptide"
STKGPSVFPLAPSSKDSLEFIASKLASTSGGTAALGCLVKDYFPEPVTVSWNSGALTSGVHTFPAVLQSSGLYSLSSVVTVPSSSLGTQTYICNVNHKPSNTKVDKKVEPKSCDKTHTCPPCPAPELLGGPSVFLFPPKPKDTLMISRTPEVTCVVVDVSHEDPEVKFNWYVDGVEVHNAKTKPREEQYNSTYRVVSVLTVLHQDWLNGKEYKCKVSNKALPAPIEKTISKAKGQPREPQVYTLPPSREEMTKNQVSLTCLVKGFYPSDIAVEWESNGQPENNYKTTPPVLDSDGSFFLYSKLTVDKSRWQQGNVFSCSVMHEALHNHYTQKSLSLSPG

SEQ ID NO: 255 - protein, 339 aa, Artificial Sequence
  source: /note="Description of Artificial Sequence: Synthetic anti-hHER2-HC-S134-DSLEFIASKLA-T135 polypeptide"
STKGPSVFPLAPSSKSDSLEFIASKLATSGGTAALGCLVKDYFPEPVTVSWNSGALTSGVHTFPAVLQSSGLYSLSSVVTVPSSSLGTQTYICNVNHKPSNTKVDKKVEPKSCDKTHTCPPCPAPELLGGPSVFLFPPKPKDTLMISRTPEVTCVVVDVSHEDPEVKFNWYVDGVEVHNAKTKPREEQYNSTYRVVSVLTVLHQDWLNGKEYKCKVSNKALPAPIEKTISKAKGQPREPQVYTLPPSREEMTKNQVSLTCLVKGFYPSDIAVEWESNGQPENNYKTTPPVLDSDGSFFLYSKLTVDKSRWQQGNVFSCSVMHEALHNHYTQKSLSLSPG

SEQ ID NO: 256 - protein, 339 aa, Artificial Sequence
  source: /note="Description of Artificial Sequence: Synthetic anti-hHER2-HC-T135-DSLEFIASKLA-S136 polypeptide"
STKGPSVFPLAPSSKSTDSLEFIASKLASGGTAALGCLVKDYFPEPVTVSWNSGALTSGVHTFPAVLQSSGLYSLSSVVTVPSSSLGTQTYICNVNHKPSNTKVDKKVEPKSCDKTHTCPPCPAPELLGGPSVFLFPPKPKDTLMISRTPEVTCVVVDVSHEDPEVKFNWYVDGVEVHNAKTKPREEQYNSTYRVVSVLTVLHQDWLNGKEYKCKVSNKALPAPIEKTISKAKGQPREPQVYTLPPSREEMTKNQVSLTCLVKGFYPSDIAVEWESNGQPENNYKTTPPVLDSDGSFFLYSKLTVDKSRWQQGNVFSCSVMHEALHNHYTQKSLSLSPG

SEQ ID NO: 257 - protein, 339 aa, Artificial Sequence
  source: /note="Description of Artificial Sequence: Synthetic anti-hHER2-HC-S136-DSLEFIASKLA-G137 polypeptide"
STKGPSVFPLAPSSKSTSDSLEFIASKLAGGTAALGCLVKDYFPEPVTVSWNSGALTSGVHTFPAVLQSSGLYSLSSVVTVPSSSLGTQTYICNVNHKPSNTKVDKKVEPKSCDKTHTCPPCPAPELLGGPSVFLFPPKPKDTLMISRTPEVTCVVVDVSHEDPEVKFNWYVDGVEVHNAKTKPREEQYNSTYRVVSVLTVLHQDWLNGKEYKCKVSNKALPAPIEKTISKAKGQPREPQVYTLPPSREEMTKNQVSLTCLVKGFYPSDIAVEWESNGQPENNYKTTPPVLDSDGSFFLYSKLTVDKSRWQQGNVFSCSVMHEALHNHYTQKSLSLSPG

SEQ ID NO: 258 - protein, 339 aa, Artificial Sequence
  source: /note="Description of Artificial Sequence: Synthetic anti-hHER2-HC-G137-DSLEFIASKLA-G138 polypeptide"
STKGPSVFPLAPSSKSTSGDSLEFIASKLAGTAALGCLVKDYFPEPVTVSWNSGALTSGVHTFPAVLQSSGLYSLSSVVTVPSSSLGTQTYICNVNHKPSNTKVDKKVEPKSCDKTHTCPPCPAPELLGGPSVFLFPPKPKDTLMISRTPEVTCVVVDVSHEDPEVKFNWYVDGVEVHNAKTKPREEQYNSTYRVVSVLTVLHQDWLNGKEYKCKVSNKALPAPIEKTISKAKGQPREPQVYTLPPSREEMTKNQVSLTCLVKGFYPSDIAVEWESNGQPENNYKTTPPVLDSDGSFFLYSKLTVDKSRWQQGNVFSCSVMHEALHNHYTQKSLSLSPG

SEQ ID NO: 259 - protein, 339 aa, Artificial Sequence
  source: /note="Description of Artificial Sequence: Synthetic anti-hHER2-HC-G138-DSLEFIASKLA-T139 polypeptide"
STKGPSVFPLAPSSKSTSGGDSLEFIASKLATAALGCLVKDYFPEPVTVSWNSGALTSGVHTFPAVLQSSGLYSLSSVVTVPSSSLGTQTYICNVNHKPSNTKVDKKVEPKSCDKTHTCPPCPAPELLGGPSVFLFPPKPKDTLMISRTPEVTCVVVDVSHEDPEVKFNWYVDGVEVHNAKTKPREEQYNSTYRVVSVLTVLHQDWLNGKEYKCKVSNKALPAPIEKTISKAKGQPREPQVYTLPPSREEMTKNQVSLTCLVKGFYPSDIAVEWESNGQPENNYKTTPPVLDSDGSFFLYSKLTVDKSRWQQGNVFSCSVMHEALHNHYTQKSLSLSPG

SEQ ID NO: 260 - protein, 339 aa, Artificial Sequence
  source: /note="Description of Artificial Sequence: Synthetic anti-hHER2-HC-E152-DSLEFIASKLA-P153 polypeptide"
STKGPSVFPLAPSSKSTSGGTAALGCLVKDYFPEDSLEFIASKLAPVTVSWNSGALTSGVHTFPAVLQSSGLYSLSSVVTVPSSSLGTQTYICNVNHKPSNTKVDKKVEPKSCDKTHTCPPCPAPELLGGPSVFLFPPKPKDTLMISRTPEVTCVVVDVSHEDPEVKFNWYVDGVEVHNAKTKPREEQYNSTYRVVSVLTVLHQDWLNGKEYKCKVSNKALPAPIEKTISKAKGQPREPQVYTLPPSREEMTKNQVSLTCLVKGFYPSDIAVEWESNGQPENNYKTTPPVLDSDGSFFLYSKLTVDKSRWQQGNVFSCSVMHEALHNHYTQKSLSLSPG

SEQ ID NO: 261 - protein, 339 aa, Artificial Sequence
  source: /note="Description of Artificial Sequence: Synthetic anti-hHER2-HC-P153-DSLEFIASKLA-V154 polypeptide"
STKGPSVFPLAPSSKSTSGGTAALGCLVKDYFPEPDSLEFIASKLAVTVSWNSGALTSGVHTFPAVLQSSGLYSLSSVVTVPSSSLGTQTYICNVNHKPSNTKVDKKVEPKSCDKTHTCPPCPAPELLGGPSVFLFPPKPKDTLMISRTPEVTCVVVDVSHEDPEVKFNWYVDGVEVHNAKTKPREEQYNSTYRVVSVLTVLHQDWLNGKEYKCKVSNKALPAPIEKTISKAKGQPREPQVYTLPPSREEMTKNQVSLTCLVKGFYPSDIAVEWESNGQPENNYKTTPPVLDSDGSFFLYSKLTVDKSRWQQGNVFSCSVMHEALHNHYTQKSLSLSPG

SEQ ID NO: 262 - protein, 339 aa, Artificial Sequence
  source: /note="Description of Artificial Sequence: Synthetic anti-hHER2-HC-N159-DSLEFIASKLA-S160 polypeptide"
STKGPSVFPLAPSSKSTSGGTAALGCLVKDYFPEPVTVSWNDSLEFIASKLASGALTSGVHTFPAVLQSSGLYSLSSVVTVPSSSLGTQTYICNVNHKPSNTKVDKKVEPKSCDKTHTCPPCPAPELLGGPSVFLFPPKPKDTLMISRTPEVTCVVVDVSHEDPEVKFNWYVDGVEVHNAKTKPREEQYNSTYRVVSVLTVLHQDWLNGKEYKCKVSNKALPAPIEKTISKAKGQPREPQVYTLPPSREEMTKNQVSLTCLVKGFYPSDIAVEWESNGQPENNYKTTPPVLDSDGSFFLYSKLTVDKSRWQQGNVFSCSVMHEALHNHYTQKSLSLSPG

SEQ ID NO: 263 - protein, 339 aa, Artificial Sequence
  source: /note="Description of Artificial Sequence: Synthetic anti-hHER2-HC-S160-DSLEFIASKLA-G161 polypeptide"
STKGPSVFPLAPSSKSTSGGTAALGCLVKDYFPEPVTVSWNSDSLEFIASKLAGALTSGVHTFPAVLQSSGLYSLSSVVTVPSSSLGTQTYICNVNHKPSNTKVDKKVEPKSCDKTHTCPPCPAPELLGGPSVFLFPPKPKDTLMISRTPEVTCVVVDVSHEDPEVKFNWYVDGVEVHNAKTKPREEQYNSTYRVVSVLTVLHQDWLNGKEYKCKVSNKALPAPIEKTISKAKGQPREPQVYTLPPSREEMTKNQVSLTCLVKGFYPSDIAVEWESNGQPENNYKTTPPVLDSDGSFFLYSKLTVDKSRWQQGNVFSCSVMHEALHNHYTQKSLSLSPG

SEQ ID NO: 264 - protein, 339 aa, Artificial Sequence
  source: /note="Description of Artificial Sequence: Synthetic anti-hHER2-HC-G161-DSLEFIASKLA-A162 polypeptide"
STKGPSVFPLAPSSKSTSGGTAALGCLVKDYFPEPVTVSWNSGDSLEFIASKLAALTSGVHTFPAVLQSSGLYSLSSVVTVPSSSLGTQTYICNVNHKPSNTKVDKKVEPKSCDKTHTCPPCPAPELLGGPSVFLFPPKPKDTLMISRTPEVTCVVVDVSHEDPEVKFNWYVDGVEVHNAKTKPREEQYNSTYRVVSVLTVLHQDWLNGKEYKCKVSNKALPAPIEKTISKAKGQPREPQVYTLPPSREEMTKNQVSLTCLVKGFYPSDIAVEWESNGQPENNYKTTPPVLDSDGSFFLYSKLTVDKSRWQQGNVFSCSVMHEALHNHYTQKSLSLSPG

SEQ ID NO: 265 - protein, 339 aa, Artificial Sequence
  source: /note="Description of Artificial Sequence: Synthetic anti-hHER2-HC-A162-DSLEFIASKLA-L163 polypeptide"
STKGPSVFPLAPSSKSTSGGTAALGCLVKDYFPEPVTVSWNSGADSLEFIASKLALTSGVHTFPAVLQSSGLYSLSSVVTVPSSSLGTQTYICNVNHKPSNTKVDKKVEPKSCDKTHTCPPCPAPELLGGPSVFLFPPKPKDTLMISRTPEVTCVVVDVSHEDPEVKFNWYVDGVEVHNAKTKPREEQYNSTYRVVSVLTVLHQDWLNGKEYKCKVSNKALPAPIEKTISKAKGQPREPQVYTLPPSREEMTKNQVSLTCLVKGFYPSDIAVEWESNGQPENNYKTTPPVLDSDGSFFLYSKLTVDKSRWQQGNVFSCSVMHEALHNHYTQKSLSLSPG

SEQ ID NO: 266 - protein, 339 aa, Artificial Sequence
  source: /note="Description of Artificial Sequence: Synthetic anti-hHER2-HC-L163-DSLEFIASKLA-T164 polypeptide"
STKGPSVFPLAPSSKSTSGGTAALGCLVKDYFPEPVTVSWNSGALDSLEFIASKLATSGVHTFPAVLQSSGLYSLSSVVTVPSSSLGTQTYICNVNHKPSNTKVDKKVEPKSCDKTHTCPPCPAPELLGGPSVFLFPPKPKDTLMISRTPEVTCVVVDVSHEDPEVKFNWYVDGVEVHNAKTKPREEQYNSTYRVVSVLTVLHQDWLNGKEYKCKVSNKALPAPIEKTISKAKGQPREPQVYTLPPSREEMTKNQVSLTCLVKGFYPSDIAVEWESNGQPENNYKTTPPVLDSDGSFFLYSKLTVDKSRWQQGNVFSCSVMHEALHNHYTQKSLSLSPG

SEQ ID NO: 267 - protein, 339 aa, Artificial Sequence
  source: /note="Description of Artificial Sequence: Synthetic anti-hHER2-HC-T164-DSLEFIASKLA-S165 polypeptide"
STKGPSVFPLAPSSKSTSGGTAALGCLVKDYFPEPVTVSWNSGALTDSLEFIASKLASGVHTFPAVLQSSGLYSLSSVVTVPSSSLGTQTYICNVNHKPSNTKVDKKVEPKSCDKTHTCPPCPAPELLGGPSVFLFPPKPKDTLMISRTPEVTCVVVDVSHEDPEVKFNWYVDGVEVHNAKTKPREEQYNSTYRVVSVLTVLHQDWLNGKEYKCKVSNKALPAPIEKTISKAKGQPREPQVYTLPPSREEMTKNQVSLTCLVKGFYPSDIAVEWESNGQPENNYKTTPPVLDSDGSFFLYSKLTVDKSRWQQGNVFSCSVMHEALHNHYTQKSLSLSPG

SEQ ID NO: 268 - protein, 339 aa, Artificial Sequence
  source: /note="Description of Artificial Sequence: Synthetic anti-hHER2-HC-S165-DSLEFIASKLA-G166 polypeptide"
STKGPSVFPLAPSSKSTSGGTAALGCLVKDYFPEPVTVSWNSGALTSDSLEFIASKLAGVHTFPAVLQSSGLYSLSSVVTVPSSSLGTQTYICNVNHKPSNTKVDKKVEPKSCDKTHTCPPCPAPELLGGPSVFLFPPKPKDTLMISRTPEVTCVVVDVSHEDPEVKFNWYVDGVEVHNAKTKPREEQYNSTYRVVSVLTVLHQDWLNGKEYKCKVSNKALPAPIEKTISKAKGQPREPQVYTLPPSREEMTKNQVSLTCLVKGFYPSDIAVEWESNGQPENNYKTTPPVLDSDGSFFLYSKLTVDKSRWQQGNVFSCSVMHEALHNHYTQKSLSLSPG

SEQ ID NO: 269 - protein, 339 aa, Artificial Sequence
  source: /note="Description of Artificial Sequence: Synthetic anti-hHER2-HC-P171-DSLEFIASKLA-A172 polypeptide"
STKGPSVFPLAPSSKSTSGGTAALGCLVKDYFPEPVTVSWNSGALTSGVHTFPDSLEFIASKLAAVLQSSGLYSLSSVVTVPSSSLGTQTYICNVNHKPSNTKVDKKVEPKSCDKTHTCPPCPAPELLGGPSVFLFPPKPKDTLMISRTPEVTCVVVDVSHEDPEVKFNWYVDGVEVHNAKTKPREEQYNSTYRVVSVLTVLHQDWLNGKEYKCKVSNKALPAPIEKTISKAKGQPREPQVYTLPPSREEMTKNQVSLTCLVKGFYPSDIAVEWESNGQPENNYKTTPPVLDSDGSFFLYSKLTVDKSRWQQGNVFSCSVMHEALHNHYTQKSLSLSPG

SEQ ID NO: 270 - protein, 339 aa, Artificial Sequence
  source: /note="Description of Artificial Sequence: Synthetic anti-hHER2-HC-S176-DSLEFIASKLA-S177 polypeptide"
STKGPSVFPLAPSSKSTSGGTAALGCLVKDYFPEPVTVSWNSGALTSGVHTFPAVLQSDSLEFIASKLASGLYSLSSVVTVPSSSLGTQTYICNVNHKPSNTKVDKKVEPKSCDKTHTCPPCPAPELLGGPSVFLFPPKPKDTLMISRTPEVTCVVVDVSHEDPEVKFNWYVDGVEVHNAKTKPREEQYNSTYRVVSVLTVLHQDWLNGKEYKCKVSNKALPAPIEKTISKAKGQPREPQVYTLPPSREEMTKNQVSLTCLVKGFYPSDIAVEWESNGQPENNYKTTPPVLDSDGSFFLYSKLTVDKSRWQQGNVFSCSVMHEALHNHYTQKSLSLSPG

SEQ ID NO: 271 - protein, 339 aa, Artificial Sequence
  source: /note="Description of Artificial Sequence: Synthetic anti-hHER2-HC-S177-DSLEFIASKLA-G178 polypeptide"
STKGPSVFPLAPSSKSTSGGTAALGCLVKDYFPEPVTVSWNSGALTSGVHTFPAVLQSSDSLEFIASKLAGLYSLSSVVTVPSSSLGTQTYICNVNHKPSNTKVDKKVEPKSCDKTHTCPPCPAPELLGGPSVFLFPPKPKDTLMISRTPEVTCVVVDVSHEDPEVKFNWYVDGVEVHNAKTKPREEQYNSTYRVVSVLTVLHQDWLNGKEYKCKVSNKALPAPIEKTISKAKGQPREPQVYTLPPSREEMTKNQVSLTCLVKGFYPSDIAVEWESNGQPENNYKTTPPVLDSDGSFFLYSKLTVDKSRWQQGNVFSCSVMHEALHNHYTQKSLSLSPG

SEQ ID NO: 272 - protein, 339 aa, Artificial Sequence
  source: /note="Description of Artificial Sequence: Synthetic anti-hHER2-HC-P189-DSLEFIASKLA-S190 polypeptide"
STKGPSVFPLAPSSKSTSGGTAALGCLVKDYFPEPVTVSWNSGALTSGVHTFPAVLQSSGLYSLSSVVTVPDSLEFIASKLASSSLGTQTYICNVNHKPSNTKVDKKVEPKSCDKTHTCPPCPAPELLGGPSVFLFPPKPKDTLMISRTPEVTCVVVDVSHEDPEVKFNWYVDGVEVHNAKTKPREEQYNSTYRVVSVLTVLHQDWLNGKEYKCKVSNKALPAPIEKTISKAKGQPREPQVYTLPPSREEMTKNQVSLTCLVKGFYPSDIAVEWESNGQPENNYKTTPPVLDSDGSFFLYSKLTVDKSRWQQGNVFSCSVMHEALHNHYTQKSLSLSPG

SEQ ID NO: 273 - protein, 339 aa, Artificial Sequence
  source: /note="Description of Artificial Sequence: Synthetic anti-hHER2-HC-S190-DSLEFIASKLA-S191 polypeptide"
STKGPSVFPLAPSSKSTSGGTAALGCLVKDYFPEPVTVSWNSGALTSGVHTFPAVLQSSGLYSLSSVVTVPSDSLEFIASKLASSLGTQTYICNVNHKPSNTKVDKKVEPKSCDKTHTCPPCPAPELLGGPSVFLFPPKPKDTLMISRTPEVTCVVVDVSHEDPEVKFNWYVDGVEVHNAKTKPREEQYNSTYRVVSVLTVLHQDWLNGKEYKCKVSNKALPAPIEKTISKAKGQPREPQVYTLPPSREEMTKNQVSLTCLVKGFYPSDIAVEWESNGQPENNYKTTPPVLDSDGSFFLYSKLTVDKSRWQQGNVFSCSVMHEALHNHYTQKSLSLSPG

SEQ ID NO: 274 - protein, 339 aa, Artificial Sequence
  source: /note="Description of Artificial Sequence: Synthetic anti-hHER2-HC-S191-DSLEFIASKLA-S192 polypeptide"
STKGPSVFPLAPSSKSTSGGTAALGCLVKDYFPEPVTVSWNSGALTSGVHTFPAVLQSSGLYSLSSVVTVPSSDSLEFIASKLASLGTQTYICNVNHKPSNTKVDKKVEPKSCDKTHTCPPCPAPELLGGPSVFLFPPKPKDTLMISRTPEVTCVVVDVSHEDPEVKFNWYVDGVEVHNAKTKPREEQYNSTYRVVSVLTVLHQDWLNGKEYKCKVSNKALPAPIEKTISKAKGQPREPQVYTLPPSREEMTKNQVSLTCLVKGFYPSDIAVEWESNGQPENNYKTTPPVLDSDGSFFLYSKLTVDKSRWQQGNVFSCSVMHEALHNHYTQKSLSLSPG

SEQ ID NO: 275 - protein, 339 aa, Artificial Sequence
  source: /note="Description of Artificial Sequence: Synthetic anti-hHER2-HC-S192-DSLEFIASKLA-L193 polypeptide"
STKGPSVFPLAPSSKSTSGGTAALGCLVKDYFPEPVTVSWNSGALTSGVHTFPAVLQSSGLYSLSSVVTVPSSSDSLEFIASKLALGTQTYICNVNHKPSNTKVDKKVEPKSCDKTHTCPPCPAPELLGGPSVFLFPPKPKDTLMISRTPEVTCVVVDVSHEDPEVKFNWYVDGVEVHNAKTKPREEQYNSTYRVVSVLTVLHQDWLNGKEYKCKVSNKALPAPIEKTISKAKGQPREPQVYTLPPSREEMTKNQVSLTCLVKGFYPSDIAVEWESNGQPENNYKTTPPVLDSDGSFFLYSKLTVDKSRWQQGNVFSCSVMHEALHNHYTQKSLSLSPG

SEQ ID NO: 276 - protein, 339 aa, Artificial Sequence
  source: /note="Description of Artificial Sequence: Synthetic anti-hHER2-HC-L193-DSLEFIASKLA-G194 polypeptide"
STKGPSVFPLAPSSKSTSGGTAALGCLVKDYFPEPVTVSWNSGALTSGVHTFPAVLQSSGLYSLSSVVTVPSSSLDSLEFIASKLAGTQTYICNVNHKPSNTKVDKKVEPKSCDKTHTCPPCPAPELLGGPSVFLFPPKPKDTLMISRTPEVTCVVVDVSHEDPEVKFNWYVDGVEVHNAKTKPREEQYNSTYRVVSVLTVLHQDWLNGKEYKCKVSNKALPAPIEKTISKAKGQPREPQVYTLPPSREEMTKNQVSLTCLVKGFYPSDIAVEWESNGQPENNYKTTPPVLDSDGSFFLYSKLTVDKSRWQQGNVFSCSVMHEALHNHYTQKSLSLSPG

SEQ ID NO: 277 - protein, 339 aa, Artificial Sequence
  source: /note="Description of Artificial Sequence: Synthetic anti-hHER2-HC-G194-DSLEFIASKLA-T195 polypeptide"
STKGPSVFPLAPSSKSTSGGTAALGCLVKDYFPEPVTVSWNSGALTSGVHTFPAVLQSSGLYSLSSVVTVPSSSLGDSLEFIASKLATQTYICNVNHKPSNTKVDKKVEPKSCDKTHTCPPCPAPELLGGPSVFLFPPKPKDTLMISRTPEVTCVVVDVSHEDPEVKFNWYVDGVEVHNAKTKPREEQYNSTYRVVSVLTVLHQDWLNGKEYKCKVSNKALPAPIEKTISKAKGQPREPQVYTLPPSREEMTKNQVSLTCLVKGFYPSDIAVEWESNGQPENNYKTTPPVLDSDGSFFLYSKLTVDKSRWQQGNVFSCSVMHEALHNHYTQKSLSLSPG

SEQ ID NO: 278 - protein, 339 aa, Artificial Sequence
  source: /note="Description of Artificial Sequence: Synthetic anti-hHER2-HC-T195-DSLEFIASKLA-Q196 polypeptide"
STKGPSVFPLAPSSKSTSGGTAALGCLVKDYFPEPVTVSWNSGALTSGVHTFPAVLQSSGLYSLSSVVTVPSSSLGTDSLEFIASKLAQTYICNVNHKPSNTKVDKKVEPKSCDKTHTCPPCPAPELLGGPSVFLFPPKPKDTLMISRTPEVTCVVVDVSHEDPEVKFNWYVDGVEVHNAKTKPREEQYNSTYRVVSVLTVLHQDWLNGKEYKCKVSNKALPAPIEKTISKAKGQPREPQVYTLPPSREEMTKNQVSLTCLVKGFYPSDIAVEWESNGQPENNYKTTPPVLDSDGSFFLYSKLTVDKSRWQQGNVFSCSVMHEALHNHYTQKSLSLSPG

SEQ ID NO: 279 - protein, 339 aa, Artificial Sequence
  source: /note="Description of Artificial Sequence: Synthetic anti-hHER2-HC-Q196-DSLEFIASKLA-T197 polypeptide"
STKGPSVFPLAPSSKSTSGGTAALGCLVKDYFPEPVTVSWNSGALTSGVHTFPAVLQSSGLYSLSSVVTVPSSSLGTQDSLEFIASKLATYICNVNHKPSNTKVDKKVEPKSCDKTHTCPPCPAPELLGGPSVFLFPPKPKDTLMISRTPEVTCVVVDVSHEDPEVKFNWYVDGVEVHNAKTKPREEQYNSTYRVVSVLTVLHQDWLNGKEYKCKVSNKALPAPIEKTISKAKGQPREPQVYTLPPSREEMTKNQVSLTCLVKGFYPSDIAVEWESNGQPENNYKTTPPVLDSDGSFFLYSKLTVDKSRWQQGNVFSCSVMHEALHNHYTQKSLSLSPG

SEQ ID NO: 280 - protein, 339 aa, Artificial Sequence
  source: /note="Description of Artificial Sequence: Synthetic anti-hHER2-HC-K205-DSLEFIASKLA-P206 polypeptide"
STKGPSVFPLAPSSKSTSGGTAALGCLVKDYFPEPVTVSWNSGALTSGVHTFPAVLQSSGLYSLSSVVTVPSSSLGTQTYICNVNHKDSLEFIASKLAPSNTKVDKKVEPKSCDKTHTCPPCPAPELLGGPSVFLFPPKPKDTLMISRTPEVTCVVVDVSHEDPEVKFNWYVDGVEVHNAKTKPREEQYNSTYRVVSVLTVLHQDWLNGKEYKCKVSNKALPAPIEKTISKAKGQPREPQVYTLPPSREEMTKNQVSLTCLVKGFYPSDIAVEWESNGQPENNYKTTPPVLDSDGSFFLYSKLTVDKSRWQQGNVFSCSVMHEALHNHYTQKSLSLSPG

SEQ ID NO: 281 - protein, 339 aa, Artificial Sequence
  source: /note="Description of Artificial Sequence: Synthetic anti-hHER2-HC-P206-DSLEFIASKLA-S207 polypeptide"
STKGPSVFPLAPSSKSTSGGTAALGCLVKDYFPEPVTVSWNSGALTSGVHTFPAVLQSSGLYSLSSVVTVPSSSLGTQTYICNVNHKPDSLEFIASKLASNTKVDKKVEPKSCDKTHTCPPCPAPELLGGPSVFLFPPKPKDTLMISRTPEVTCVVVDVSHEDPEVKFNWYVDGVEVHNAKTKPREEQYNSTYRVVSVLTVLHQDWLNGKEYKCKVSNKALPAPIEKTISKAKGQPREPQVYTLPPSREEMTKNQVSLTCLVKGFYPSDIAVEWESNGQPENNYKTTPPVLDSDGSFFLYSKLTVDKSRWQQGNVFSCSVMHEALHNHYTQKSLSLSPG

SEQ ID NO: 282 - protein, 339 aa, Artificial Sequence
  source: /note="Description of Artificial Sequence: Synthetic anti-hHER2-HC-S207-DSLEFIASKLA-N208 polypeptide"
STKGPSVFPLAPSSKSTSGGTAALGCLVKDYFPEPVTVSWNSGALTSGVHTFPAVLQSSGLYSLSSVVTVPSSSLGTQTYICNVNHKPSDSLEFIASKLANTKVDKKVEPKSCDKTHTCPPCPAPELLGGPSVFLFPPKPKDTLMISRTPEVTCVVVDVSHEDPEVKFNWYVDGVEVHNAKTKPREEQYNSTYRVVSVLTVLHQDWLNGKEYKCKVSNKALPAPIEKTISKAKGQPREPQVYTLPPSREEMTKNQVSLTCLVKGFYPSDIAVEWESNGQPENNYKTTPPVLDSDGSFFLYSKLTVDKSRWQQGNVFSCSVMHEALHNHYTQKSLSLSPG

SEQ ID NO: 283 - protein, 339 aa, Artificial Sequence
  source: /note="Description of Artificial Sequence: Synthetic anti-hHER2-HC-P230-DSLEFIASKLA-A231 polypeptide"
STKGPSVFPLAPSSKSTSGGTAALGCLVKDYFPEPVTVSWNSGALTSGVHTFPAVLQSSGLYSLSSVVTVPSSSLGTQTYICNVNHKPSNTKVDKKVEPKSCDKTHTCPPCPDSLEFIASKLAAPELLGGPSVFLFPPKPKDTLMISRTPEVTCVVVDVSHEDPEVKFNWYVDGVEVHNAKTKPREEQYNSTYRVVSVLTVLHQDWLNGKEYKCKVSNKALPAPIEKTISKAKGQPREPQVYTLPPSREEMTKNQVSLTCLVKGFYPSDIAVEWESNGQPENNYKTTPPVLDSDGSFFLYSKLTVDKSRWQQGNVFSCSVMHEALHNHYTQKSLSLSPG

SEQ ID NO: 284 - protein, 339 aa, Artificial Sequence
  source: /note="Description of Artificial Sequence: Synthetic anti-hHER2-HC-A231-DSLEFIASKLA-P232 polypeptide"
STKGPSVFPLAPSSKSTSGGTAALGCLVKDYFPEPVTVSWNSGALTSGVHTFPAVLQSSGLYSLSSVVTVPSSSLGTQTYICNVNHKPSNTKVDKKVEPKSCDKTHTCPPCPADSLEFIASKLAPELLGGPSVFLFPPKPKDTLMISRTPEVTCVVVDVSHEDPEVKFNWYVDGVEVHNAKTKPREEQYNSTYRVVSVLTVLHQDWLNGKEYKCKVSNKALPAPIEKTISKAKGQPREPQVYTLPPSREEMTKNQVSLTCLVKGFYPSDIAVEWESNGQPENNYKTTPPVLDSDGSFFLYSKLTVDKSRWQQGNVFSCSVMHEALHNHYTQKSLSLSPG

SEQ ID NO: 285 - protein, 339 aa, Artificial Sequence
  source: /note="Description of Artificial Sequence: Synthetic anti-hHER2-HC-P232-DSLEFIASKLA-E233 polypeptide"
STKGPSVFPLAPSSKSTSGGTAALGCLVKDYFPEPVTVSWNSGALTSGVHTFPAVLQSSGLYSLSSVVTVPSSSLGTQTYICNVNHKPSNTKVDKKVEPKSCDKTHTCPPCPAPDSLEFIASKLAELLGGPSVFLFPPKPKDTLMISRTPEVTCVVVDVSHEDPEVKFNWYVDGVEVHNAKTKPREEQYNSTYRVVSVLTVLHQDWLNGKEYKCKVSNKALPAPIEKTISKAKGQPREPQVYTLPPSREEMTKNQVSLTCLVKGFYPSDIAVEWESNGQPENNYKTTPPVLDSDGSFFLYSKLTVDKSRWQQGNVFSCSVMHEALHNHYTQKSLSLSPG

SEQ ID NO: 286 - protein, 339 aa, Artificial Sequence
  source: /note="Description of Artificial Sequence: Synthetic anti-hHER2-HC-E233-DSLEFIASKLA-L234 polypeptide"
STKGPSVFPLAPSSKSTSGGTAALGCLVKDYFPEPVTVSWNSGALTSGVHTFPAVLQSSGLYSLSSVVTVPSSSLGTQTYICNVNHKPSNTKVDKKVEPKSCDKTHTCPPCPAPEDSLEFIASKLALLGGPSVFLFPPKPKDTLMISRTPEVTCVVVDVSHEDPEVKFNWYVDGVEVHNAKTKPREEQYNSTYRVVSVLTVLHQDWLNGKEYKCKVSNKALPAPIEKTISKAKGQPREPQVYTLPPSREEMTKNQVSLTCLVKGFYPSDIAVEWESNGQPENNYKTTPPVLDSDGSFFLYSKLTVDKSRWQQGNVFSCSVMHEALHNHYTQKSLSLSPG

SEQ ID NO: 287 - protein, 339 aa, Artificial Sequence
  source: /note="Description of Artificial Sequence: Synthetic anti-hHER2-HC-L234-DSLEFIASKLA-L235 polypeptide"
STKGPSVFPLAPSSKSTSGGTAALGCLVKDYFPEPVTVSWNSGALTSGVHTFPAVLQSSGLYSLSSVVTVPSSSLGTQTYICNVNHKPSNTKVDKKVEPKSCDKTHTCPPCPAPELDSLEFIASKLALGGPSVFLFPPKPKDTLMISRTPEVTCVVVDVSHEDPEVKFNWYVDGVEVHNAKTKPREEQYNSTYRVVSVLTVLHQDWLNGKEYKCKVSNKALPAPIEKTISKAKGQPREPQVYTLPPSREEMTKNQVSLTCLVKGFYPSDIAVEWESNGQPENNYKTTPPVLDSDGSFFLYSKLTVDKSRWQQGNVFSCSVMHEALHNHYTQKSLSLSPG

SEQ ID NO: 288 - protein, 339 aa, Artificial Sequence
  source: /note="Description of Artificial Sequence: Synthetic anti-hHER2-HC-L235-DSLEFIASKLA-G236 polypeptide"
STKGPSVFPLAPSSKSTSGGTAALGCLVKDYFPEPVTVSWNSGALTSGVHTFPAVLQSSGLYSLSSVVTVPSSSLGTQTYICNVNHKPSNTKVDKKVEPKSCDKTHTCPPCPAPELLDSLEFIASKLAGGPSVFLFPPKPKDTLMISRTPEVTCVVVDVSHEDPEVKFNWYVDGVEVHNAKTKPREEQYNSTYRVVSVLTVLHQDWLNGKEYKCKVSNKALPAPIEKTISKAKGQPREPQVYTLPPSREEMTKNQVSLTCLVKGFYPSDIAVEWESNGQPENNYKTTPPVLDSDGSFFLYSKLTVDKSRWQQGNVFSCSVMHEALHNHYTQKSLSLSPG

SEQ ID NO: 289 - protein, 339 aa, Artificial Sequence
  source: /note="Description of Artificial Sequence: Synthetic anti-hHER2-HC-G236-DSLEFIASKLA-G237 polypeptide"
STKGPSVFPLAPSSKSTSGGTAALGCLVKDYFPEPVTVSWNSGALTSGVHTFPAVLQSSGLYSLSSVVTVPSSSLGTQTYICNVNHKPSNTKVDKKVEPKSCDKTHTCPPCPAPELLGDSLEFIASKLAGPSVFLFPPKPKDTLMISRTPEVTCVVVDVSHEDPEVKFNWYVDGVEVHNAKTKPREEQYNSTYRVVSVLTVLHQDWLNGKEYKCKVSNKALPAPIEKTISKAKGQPREPQVYTLPPSREEMTKNQVSLTCLVKGFYPSDIAVEWESNGQPENNYKTTPPVLDSDGSFFLYSKLTVDKSRWQQGNVFSCSVMHEALHNHYTQKSLSLSPG

SEQ ID NO: 290 - protein, 339 aa, Artificial Sequence
  source: /note="Description of Artificial Sequence: Synthetic anti-hHER2-HC-P244-DSLEFIASKLA-P245 polypeptide"
STKGPSVFPLAPSSKSTSGGTAALGCLVKDYFPEPVTVSWNSGALTSGVHTFPAVLQSSGLYSLSSVVTVPSSSLGTQTYICNVNHKPSNTKVDKKVEPKSCDKTHTCPPCPAPELLGGPSVFLFPDSLEFIASKLAPKPKDTLMISRTPEVTCVVVDVSHEDPEVKFNWYVDGVEVHNAKTKPREEQYNSTYRVVSVLTVLHQDWLNGKEYKCKVSNKALPAPIEKTISKAKGQPREPQVYTLPPSREEMTKNQVSLTCLVKGFYPSDIAVEWESNGQPENNYKTTPPVLDSDGSFFLYSKLTVDKSRWQQGNVFSCSVMHEALHNHYTQKSLSLSPG

SEQ ID NO: 291 - protein, 339 aa, Artificial Sequence
  source: /note="Description of Artificial Sequence: Synthetic anti-hHER2-HC-P245-DSLEFIASKLA-K246 polypeptide"
STKGPSVFPLAPSSKSTSGGTAALGCLVKDYFPEPVTVSWNSGALTSGVHTFPAVLQSSGLYSLSSVVTVPSSSLGTQTYICNVNHKPSNTKVDKKVEPKSCDKTHTCPPCPAPELLGGPSVFLFPPDSLEFIASKLAKPKDTLMISRTPEVTCVVVDVSHEDPEVKFNWYVDGVEVHNAKTKPREEQYNSTYRVVSVLTVLHQDWLNGKEYKCKVSNKALPAPIEKTISKAKGQPREPQVYTLPPSREEMTKNQVSLTCLVKGFYPSDIAVEWESNGQPENNYKTTPPVLDSDGSFFLYSKLTVDKSRWQQGNVFSCSVMHEALHNHYTQKSLSLSPG

SEQ ID NO: 292 - protein, 339 aa, Artificial Sequence
  source: /note="Description of Artificial Sequence: Synthetic anti-hHER2-HC-I253-DSLEFIASKLA-S254 polypeptide"
STKGPSVFPLAPSSKSTSGGTAALGCLVKDYFPEPVTVSWNSGALTSGVHTFPAVLQSSGLYSLSSVVTVPSSSLGTQTYICNVNHKPSNTKVDKKVEPKSCDKTHTCPPCPAPELLGGPSVFLFPPKPKDTLMIDSLEFIASKLASRTPEVTCVVVDVSHEDPEVKFNWYVDGVEVHNAKTKPREEQYNSTYRVVSVLTVLHQDWLNGKEYKCKVSNKALPAPIEKTISKAKGQPREPQVYTLPPSREEMTKNQVSLTCLVKGFYPSDIAVEWESNGQPENNYKTTPPVLDSDGSFFLYSKLTVDKSRWQQGNVFSCSVMHEALHNHYTQKSLSLSPG

SEQ ID NO: 293 - protein, 339 aa, Artificial Sequence
  source: /note="Description of Artificial Sequence: Synthetic anti-hHER2-HC-S254-DSLEFIASKLA-R255 polypeptide"
STKGPSVFPLAPSSKSTSGGTAALGCLVKDYFPEPVTVSWNSGALTSGVHTFPAVLQSSGLYSLSSVVTVPSSSLGTQTYICNVNHKPSNTKVDKKVEPKSCDKTHTCPPCPAPELLGGPSVFLFPPKPKDTLMISDSLEFIASKLARTPEVTCVVVDVSHEDPEVKFNWYVDGVEVHNAKTKPREEQYNSTYRVVSVLTVLHQDWLNGKEYKCKVSNKALPAPIEKTISKAKGQPREPQVYTLPPSREEMTKNQVSLTCLVKGFYPSDIAVEWESNGQPENNYKTTPPVLDSDGSFFLYSKLTVDKSRWQQGNVFSCSVMHEALHNHYTQKSLSLSPG

SEQ ID NO: 294 - protein, 339 aa, Artificial Sequence
  source: /note="Description of Artificial Sequence: Synthetic anti-hHER2-HC-R255-DSLEFIASKLA-T256 polypeptide"
STKGPSVFPLAPSSKSTSGGTAALGCLVKDYFPEPVTVSWNSGALTSGVHTFPAVLQSSGLYSLSSVVTVPSSSLGTQTYICNVNHKPSNTKVDKKVEPKSCDKTHTCPPCPAPELLGGPSVFLFPPKPKDTLMISRDSLEFIASKLATPEVTCVVVDVSHEDPEVKFNWYVDGVEVHNAKTKPREEQYNSTYRVVSVLTVLHQDWLNGKEYKCKVSNKALPAPIEKTISKAKGQPREPQVYTLPPSREEMTKNQVSLTCLVKGFYPSDIAVEWESNGQPENNYKTTPPVLDSDGSFFLYSKLTVDKSRWQQGNVFSCSVMHEALHNHYTQKSLSLSPG

SEQ ID NO: 295 - protein, 339 aa, Artificial Sequence
  source: /note="Description of Artificial Sequence: Synthetic anti-hHER2-HC-T256-DSLEFIASKLA-P257 polypeptide"
STKGPSVFPLAPSSKSTSGGTAALGCLVKDYFPEPVTVSWNSGALTSGVHTFPAVLQSSGLYSLSSVVTVPSSSLGTQTYICNVNHKPSNTKVDKKVEPKSCDKTHTCPPCPAPELLGGPSVFLFPPKPKDTLMISRTDSLEFIASKLAPEVTCVVVDVSHEDPEVKFNWYVDGVEVHNAKTKPREEQYNSTYRVVSVLTVLHQDWLNGKEYKCKVSNKALPAPIEKTISKAKGQPREPQVYTLPPSREEMTKNQVSLTCLVKGFYPSDIAVEWESNGQPENNYKTTPPVLDSDGSFFLYSKLTVDKSRWQQGNVFSCSVMHEALHNHYTQKSLSLSPG

SEQ ID NO: 296 - protein, 339 aa, Artificial Sequence
  source: /note="Description of Artificial Sequence: Synthetic anti-hHER2-HC-P257-DSLEFIASKLA-E258 polypeptide"
STKGPSVFPLAPSSKSTSGGTAALGCLVKDYFPEPVTVSWNSGALTSGVHTFPAVLQSSGLYSLSSVVTVPSSSLGTQTYICNVNHKPSNTKVDKKVEPKSCDKTHTCPPCPAPELLGGPSVFLFPPKPKDTLMISRTPDSLEFIASKLAEVTCVVVDVSHEDPEVKFNWYVDGVEVHNAKTKPREEQYNSTYRVVSVLTVLHQDWLNGKEYKCKVSNKALPAPIEKTISKAKGQPREPQVYTLPPSREEMTKNQVSLTCLVKGFYPSDIAVEWESNGQPENNYKTTPPVLDSDGSFFLYSKLTVDKSRWQQGNVFSCSVMHEALHNHYTQKSLSLSPG

SEQ ID NO: 297 - protein, 339 aa, Artificial Sequence
  source: /note="Description of Artificial Sequence: Synthetic anti-hHER2-HC-S267-DSLEFIASKLA-H268 polypeptide"
STKGPSVFPLAPSSKSTSGGTAALGCLVKDYFPEPVTVSWNSGALTSGVHTFPAVLQSSGLYSLSSVVTVPSSSLGTQTYICNVNHKPSNTKVDKKVEPKSCDKTHTCPPCPAPELLGGPSVFLFPPKPKDTLMISRTPEVTCVVVDVSDSLEFIASKLAHEDPEVKFNWYVDGVEVHNAKTKPREEQYNSTYRVVSVLTVLHQDWLNGKEYKCKVSNKALPAPIEKTISKAKGQPREPQVYTLPPSREEMTKNQVSLTCLVKGFYPSDIAVEWESNGQPENNYKTTPPVLDSDGSFFLYSKLTVDKSRWQQGNVFSCSVMHEALHNHYTQKSLSLSPG

SEQ ID NO: 298 - protein, 339 aa, Artificial Sequence
  source: /note="Description of Artificial Sequence: Synthetic anti-hHER2-HC-H268-DSLEFIASKLA-E269 polypeptide"
STKGPSVFPLAPSSKSTSGGTAALGCLVKDYFPEPVTVSWNSGALTSGVHTFPAVLQSSGLYSLSSVVTVPSSSLGTQTYICNVNHKPSNTKVDKKVEPKSCDKTHTCPPCPAPELLGGPSVFLFPPKPKDTLMISRTPEVTCVVVDVSHDSLEFIASKLAEDPEVKFNWYVDGVEVHNAKTKPREEQYNSTYRVVSVLTVLHQDWLNGKEYKCKVSNKALPAPIEKTISKAKGQPREPQVYTLPPSREEMTKNQVSLTCLVKGFYPSDIAVEWESNGQPENNYKTTPPVLDSDGSFFLYSKLTVDKSRWQQGNVFSCSVMHEALHNHYTQKSLSLSPG

SEQ ID NO: 299 - protein, 339 aa, Artificial Sequence
  source: /note="Description of Artificial Sequence: Synthetic anti-hHER2-HC-E269-DSLEFIASKLA-D270 polypeptide"
STKGPSVFPLAPSSKSTSGGTAALGCLVKDYFPEPVTVSWNSGALTSGVHTFPAVLQSSGLYSLSSVVTVPSSSLGTQTYICNVNHKPSNTKVDKKVEPKSCDKTHTCPPCPAPELLGGPSVFLFPPKPKDTLMISRTPEVTCVVVDVSHEDSLEFIASKLADPEVKFNWYVDGVEVHNAKTKPREEQYNSTYRVVSVLTVLHQDWLNGKEYKCKVSNKALPAPIEKTISKAKGQPREPQVYTLPPSREEMTKNQVSLTCLVKGFYPSDIAVEWESNGQPENNYKTTPPVLDSDGSFFLYSKLTVDKSRWQQGNVFSCSVMHEALHNHYTQKSLSLSPG

SEQ ID NO: 300 - protein, 339 aa, Artificial Sequence
  source: /note="Description of Artificial Sequence: Synthetic anti-hHER2-HC-D270-DSLEFIASKLA-P271 polypeptide"
STKGPSVFPLAPSSKSTSGGTAALGCLVKDYFPEPVTVSWNSGALTSGVHTFPAVLQSSGLYSLSSVVTVPSSSLGTQTYICNVNHKPSNTKVDKKVEPKSCDKTHTCPPCPAPELLGGPSVFLFPPKPKDTLMISRTPEVTCVVVDVSHEDDSLEFIASKLAPEVKFNWYVDGVEVHNAKTKPREEQYNSTYRVVSVLTVLHQDWLNGKEYKCKVSNKALPAPIEKTISKAKGQPREPQVYTLPPSREEMTKNQVSLTCLVKGFYPSDIAVEWESNGQPENNYKTTPPVLDSDGSFFLYSKLTVDKSRWQQGNVFSCSVMHEALHNHYTQKSLSLSPG

SEQ ID NO: 301 - protein, 339 aa, Artificial Sequence
  source: /note="Description of Artificial Sequence: Synthetic anti-hHER2-HC-P271-DSLEFIASKLA-E272 polypeptide"
STKGPSVFPLAPSSKSTSGGTAALGCLVKDYFPEPVTVSWNSGALTSGVHTFPAVLQSSGLYSLSSVVTVPSSSLGTQTYICNVNHKPSNTKVDKKVEPKSCDKTHTCPPCPAPELLGGPSVFLFPPKPKDTLMISRTPEVTCVVVDVSHEDPDSLEFIASKLAEVKFNWYVDGVEVHNAKTKPREEQYNSTYRVVSVLTVLHQDWLNGKEYKCKVSNKALPAPIEKTISKAKGQPREPQVYTLPPSREEMTKNQVSLTCLVKGFYPSDIAVEWESNGQPENNYKTTPPVLDSDGSFFLYSKLTVDKSRWQQGNVFSCSVMHEALHNHYTQKSLSLSPG

SEQ ID NO: 302 - protein, 339 aa, Artificial Sequence
  source: /note="Description of Artificial Sequence: Synthetic anti-hHER2-HC-D280-DSLEFIASKLA-G281 polypeptide"
STKGPSVFPLAPSSKSTSGGTAALGCLVKDYFPEPVTVSWNSGALTSGVHTFPAVLQSSGLYSLSSVVTVPSSSLGTQTYICNVNHKPSNTKVDKKVEPKSCDKTHTCPPCPAPELLGGPSVFLFPPKPKDTLMISRTPEVTCVVVDVSHEDPEVKFNWYVDDSLEFIASKLAGVEVHNAKTKPREEQYNSTYRVVSVLTVLHQDWLNGKEYKCKVSNKALPAPIEKTISKAKGQPREPQVYTLPPSREEMTKNQVSLTCLVKGFYPSDIAVEWESNGQPENNYKTTPPVLDSDGSFFLYSKLTVDKSRWQQGNVFSCSVMHEALHNHYTQKSLSLSPG

SEQ ID NO: 303 - protein, 339 aa, Artificial Sequence
  source: /note="Description of Artificial Sequence: Synthetic anti-hHER2-HC-H285-DSLEFIASKLA-N286 polypeptide"
STKGPSVFPLAPSSKSTSGGTAALGCLVKDYFPEPVTVSWNSGALTSGVHTFPAVLQSSGLYSLSSVVTVPSSSLGTQTYICNVNHKPSNTKVDKKVEPKSCDKTHTCPPCPAPELLGGPSVFLFPPKPKDTLMISRTPEVTCVVVDVSHEDPEVKFNWYVDGVEVHDSLEFIASKLANAKTKPREEQYNSTYRVVSVLTVLHQDWLNGKEYKCKVSNKALPAPIEKTISKAKGQPREPQVYTLPPSREEMTKNQVSLTCLVKGFYPSDIAVEWESNGQPENNYKTTPPVLDSDGSFFLYSKLTVDKSRWQQGNVFSCSVMHEALHNHYTQKSLSLSPG

SEQ ID NO: 304 - protein, 339 aa, Artificial Sequence
  source: /note="Description of Artificial Sequence: Synthetic anti-hHER2-HC-N286-DSLEFIASKLA-A287 polypeptide"
STKGPSVFPLAPSSKSTSGGTAALGCLVKDYFPEPVTVSWNSGALTSGVHTFPAVLQSSGLYSLSSVVTVPSSSLGTQTYICNVNHKPSNTKVDKKVEPKSCDKTHTCPPCPAPELLGGPSVFLFPPKPKDTLMISRTPEVTCVVVDVSHEDPEVKFNWYVDGVEVHNDSLEFIASKLAAKTKPREEQYNSTYRVVSVLTVLHQDWLNGKEYKCKVSNKALPAPIEKTISKAKGQPREPQVYTLPPSREEMTKNQVSLTCLVKGFYPSDIAVEWESNGQPENNYKTTPPVLDSDGSFFLYSKLTVDKSRWQQGNVFSCSVMHEALHNHYTQKSLSLSPG

SEQ ID NO: 305 - protein, 339 aa, Artificial Sequence
  source: /note="Description of Artificial Sequence: Synthetic anti-hHER2-HC-P291-DSLEFIASKLA-R292 polypeptide"
STKGPSVFPLAPSSKSTSGGTAALGCLVKDYFPEPVTVSWNSGALTSGVHTFPAVLQSSGLYSLSSVVTVPSSSLGTQTYICNVNHKPSNTKVDKKVEPKSCDKTHTCPPCPAPELLGGPSVFLFPPKPKDTLMISRTPEVTCVVVDVSHEDPEVKFNWYVDGVEVHNAKTKPDSLEFIASKLAREEQYNSTYRVVSVLTVLHQDWLNGKEYKCKVSNKALPAPIEKTISKAKGQPREPQVYTLPPSREEMTKNQVSLTCLVKGFYPSDIAVEWESNGQPENNYKTTPPVLDSDGSFFLYSKLTVDKSRWQQGNVFSCSVMHEALHNHYTQKSLSLSPG

SEQ ID NO: 306 - protein, 339 aa, Artificial Sequence
  source: /note="Description of Artificial Sequence: Synthetic anti-hHER2-HC-T307-DSLEFIASKLA-V308 polypeptide"
STKGPSVFPLAPSSKSTSGGTAALGCLVKDYFPEPVTVSWNSGALTSGVHTFPAVLQSSGLYSLSSVVTVPSSSLGTQTYICNVNHKPSNTKVDKKVEPKSCDKTHTCPPCPAPELLGGPSVFLFPPKPKDTLMISRTPEVTCVVVDVSHEDPEVKFNWYVDGVEVHNAKTKPREEQYNSTYRVVSVLTDSLEFIASKLAVLHQDWLNGKEYKCKVSNKALPAPIEKTISKAKGQPREPQVYTLPPSREEMTKNQVSLTCLVKGFYPSDIAVEWESNGQPENNYKTTPPVLDSDGSFFLYSKLTVDKSRWQQGNVFSCSVMHEALHNHYTQKSLSLSPG

SEQ ID NO: 307 - protein, 339 aa, Artificial Sequence
  source: /note="Description of Artificial Sequence: Synthetic anti-hHER2-HC-V308-DSLEFIASKLA-L309 polypeptide"
STKGPSVFPLAPSSKSTSGGTAALGCLVKDYFPEPVTVSWNSGALTSGVHTFPAVLQSSGLYSLSSVVTVPSSSLGTQTYICNVNHKPSNTKVDKKVEPKSCDKTHTCPPCPAPELLGGPSVFLFPPKPKDTLMISRTPEVTCVVVDVSHEDPEVKFNWYVDGVEVHNAKTKPREEQYNSTYRVVSVLTVDSLEFIASKLALHQDWLNGKEYKCKVSNKALPAPIEKTISKAKGQPREPQVYTLPPSREEMTKNQVSLTCLVKGFYPSDIAVEWESNGQPENNYKTTPPVLDSDGSFFLYSKLTVDKSRWQQGNVFSCSVMHEALHNHYTQKSLSLSPG

SEQ ID NO: 308 - protein, 339 aa, Artificial Sequence
  source: /note="Description of Artificial Sequence: Synthetic anti-hHER2-HC-L309-DSLEFIASKLA-H310 polypeptide"
STKGPSVFPLAPSSKSTSGGTAALGCLVKDYFPEPVTVSWNSGALTSGVHTFPAVLQSSGLYSLSSVVTVPSSSLGTQTYICNVNHKPSNTKVDKKVEPKSCDKTHTCPPCPAPELLGGPSVFLFPPKPKDTLMISRTPEVTCVVVDVSHEDPEVKFNWYVDGVEVHNAKTKPREEQYNSTYRVVSVLTVLDSLEFIASKLAHQDWLNGKEYKCKVSNKALPAPIEKTISKAKGQPREPQVYTLPPSREEMTKNQVSLTCLVKGFYPSDIAVEWESNGQPENNYKTTPPVLDSDGSFFLYSKLTVDKSRWQQGNVFSCSVMHEALHNHYTQKSLSLSPG

SEQ ID NO: 309 - protein, 339 aa, Artificial Sequence
  source: /note="Description of Artificial Sequence: Synthetic anti-hHER2-HC-H310-DSLEFIASKLA-Q311 polypeptide"
STKGPSVFPLAPSSKSTSGGTAALGCLVKDYFPEPVTVSWNSGALTSGVHTFPAVLQSSGLYSLSSVVTVPSSSLGTQTYICNVNHKPSNTKVDKKVEPKSCDKTHTCPPCPAPELLGGPSVFLFPPKPKDTLMISRTPEVTCVVVDVSHEDPEVKFNWYVDGVEVHNAKTKPREEQYNSTYRVVSVLTVLHDSLEFIASKLAQDWLNGKEYKCKVSNKALPAPIEKTISKAKGQPREPQVYTLPPSREEMTKNQVSLTCLVKGFYPSDIAVEWESNGQPENNYKTTPPVLDSDGSFFLYSKLTVDKSRWQQGNVFSCSVMHEALHNHYTQKSLSLSPG

SEQ ID NO: 310 - protein, 339 aa, Artificial Sequence
  source: /note="Description of Artificial Sequence: Synthetic anti-hHER2-HC-N315-DSLEFIASKLA-G316 polypeptide"
STKGPSVFPLAPSSKSTSGGTAALGCLVKDYFPEPVTVSWNSGALTSGVHTFPAVLQSSGLYSLSSVVTVPSSSLGTQTYICNVNHKPSNTKVDKKVEPKSCDKTHTCPPCPAPELLGGPSVFLFPPKPKDTLMISRTPEVTCVVVDVSHEDPEVKFNWYVDGVEVHNAKTKPREEQYNSTYRVVSVLTVLHQDWLNDSLEFIASKLAGKEYKCKVSNKALPAPIEKTISKAKGQPREPQVYTLPPSREEMTKNQVSLTCLVKGFYPSDIAVEWESNGQPENNYKTTPPVLDSDGSFFLYSKLTVDKSRWQQGNVFSCSVMHEALHNHYTQKSLSLSPG

SEQ ID NO: 311 - protein, 339 aa, Artificial Sequence
  source: /note="Description of Artificial Sequence: Synthetic anti-hHER2-HC-G316-DSLEFIASKLA-K317 polypeptide"
STKGPSVFPLAPSSKSTSGGTAALGCLVKDYFPEPVTVSWNSGALTSGVHTFPAVLQSSGLYSLSSVVTVPSSSLGTQTYICNVNHKPSNTKVDKKVEPKSCDKTHTCPPCPAPELLGGPSVFLFPPKPKDTLMISRTPEVTCVVVDVSHEDPEVKFNWYVDGVEVHNAKTKPREEQYNSTYRVVSVLTVLHQDWLNGDSLEFIASKLAKEYKCKVSNKALPAPIEKTISKAKGQPREPQVYTLPPSREEMTKNQVSLTCLVKGFYPSDIAVEWESNGQPENNYKTTPPVLDSDGSFFLYSKLTVDKSRWQQGNVFSCSVMHEALHNHYTQKSLSLSPG

SEQ ID NO: 312 - protein, 339 aa, Artificial Sequence
  source: /note="Description of Artificial Sequence: Synthetic anti-hHER2-HC-K317-DSLEFIASKLA-E318 polypeptide"
STKGPSVFPLAPSSKSTSGGTAALGCLVKDYFPEPVTVSWNSGALTSGVHTFPAVLQSSGLYSLSSVVTVPSSSLGTQTYICNVNHKPSNTKVDKKVEPKSCDKTHTCPPCPAPELLGGPSVFLFPPKPKDTLMISRTPEVTCVVVDVSHEDPEVKFNWYVDGVEVHNAKTKPREEQYNSTYRVVSVLTVLHQDWLNGKDSLEFIASKLAEYKCKVSNKALPAPIEKTISKAKGQPREPQVYTLPPSREEMTKNQVSLTCLVKGFYPSDIAVEWESNGQPENNYKTTPPVLDSDGSFFLYSKLTVDKSRWQQGNVFSCSVMHEALHNHYTQKSLSLSPG

SEQ ID NO: 313 - protein, 339 aa, Artificial Sequence
  source: /note="Description of Artificial Sequence: Synthetic anti-hHER2-HC-K326-DSLEFIASKLA-A327 polypeptide"
STKGPSVFPLAPSSKSTSGGTAALGCLVKDYFPEPVTVSWNSGALTSGVHTFPAVLQSSGLYSLSSVVTVPSSSLGTQTYICNVNHKPSNTKVDKKVEPKSCDKTHTCPPCPAPELLGGPSVFLFPPKPKDTLMISRTPEVTCVVVDVSHEDPEVKFNWYVDGVEVHNAKTKPREEQYNSTYRVVSVLTVLHQDWLNGKEYKCKVSNKDSLEFIASKLAALPAPIEKTISKAKGQPREPQVYTLPPSREEMTKNQVSLTCLVKGFYPSDIAVEWESNGQPENNYKTTPPVLDSDGSFFLYSKLTVDKSRWQQGNVFSCSVMHEALHNHYTQKSLSLSPG

SEQ ID NO: 314 - protein, 339 aa, Artificial Sequence
  source: /note="Description of Artificial Sequence: Synthetic anti-hHER2-HC-A327-DSLEFIASKLA-L328 polypeptide"
STKGPSVFPLAPSSKSTSGGTAALGCLVKDYFPEPVTVSWNSGALTSGVHTFPAVLQSSGLYSLSSVVTVPSSSLGTQTYICNVNHKPSNTKVDKKVEPKSCDKTHTCPPCPAPELLGGPSVFLFPPKPKDTLMISRTPEVTCVVVDVSHEDPEVKFNWYVDGVEVHNAKTKPREEQYNSTYRVVSVLTVLHQDWLNGKEYKCKVSNKADSLEFIASKLALPAPIEKTISKAKGQPREPQVYTLPPSREEMTKNQVSLTCLVKGFYPSDIAVEWESNGQPENNYKTTPPVLDSDGSFFLYSKLTVDKSRWQQGNVFSCSVMHEALHNHYTQKSLSLSPG

SEQ ID NO: 315 - protein, 339 aa, Artificial Sequence
  source: /note="Description of Artificial Sequence: Synthetic anti-hHER2-HC-L328-DSLEFIASKLA-P329 polypeptide"
STKGPSVFPLAPSSKSTSGGTAALGCLVKDYFPEPVTVSWNSGALTSGVHTFPAVLQSSGLYSLSSVVTVPSSSLGTQTYICNVNHKPSNTKVDKKVEPKSCDKTHTCPPCPAPELLGGPSVFLFPPKPKDTLMISRTPEVTCVVVDVSHEDPEVKFNWYVDGVEVHNAKTKPREEQYNSTYRVVSVLTVLHQDWLNGKEYKCKVSNKALDSLEFIASKLAPAPIEKTISKAKGQPREPQVYTLPPSREEMTKNQVSLTCLVKGFYPSDIAVEWESNGQPENNYKTTPPVLDSDGSFFLYSKLTVDKSRWQQGNVFSCSVMHEALHNHYTQKSLSLSPG

SEQ ID NO: 316 - protein, 339 aa, Artificial Sequence
  source: /note="Description of Artificial Sequence: Synthetic anti-hHER2-HC-P329-DSLEFIASKLA-A330 polypeptide"
STKGPSVFPLAPSSKSTSGGTAALGCLVKDYFPEPVTVSWNSGALTSGVHTFPAVLQSSGLYSLSSVVTVPSSSLGTQTYICNVNHKPSNTKVDKKVEPKSCDKTHTCPPCPAPELLGGPSVFLFPPKPKDTLMISRTPEVTCVVVDVSHEDPEVKFNWYVDGVEVHNAKTKPREEQYNSTYRVVSVLTVLHQDWLNGKEYKCKVSNKALPDSLEFIASKLAAPIEKTISKAKGQPREPQVYTLPPSREEMTKNQVSLTCLVKGFYPSDIAVEWESNGQPENNYKTTPPVLDSDGSFFLYSKLTVDKSRWQQGNVFSCSVMHEALHNHYTQKSLSLSPG

SEQ ID NO: 317 - protein, 339 aa, Artificial Sequence
  source: /note="Description of Artificial Sequence: Synthetic anti-hHER2-HC-A330-DSLEFIASKLA-P331 polypeptide"
STKGPSVFPLAPSSKSTSGGTAALGCLVKDYFPEPVTVSWNSGALTSGVHTFPAVLQSSGLYSLSSVVTVPSSSLGTQTYICNVNHKPSNTKVDKKVEPKSCDKTHTCPPCPAPELLGGPSVFLFPPKPKDTLMISRTPEVTCVVVDVSHEDPEVKFNWYVDGVEVHNAKTKPREEQYNSTYRVVSVLTVLHQDWLNGKEYKCKVSNKALPADSLEFIASKLAPIEKTISKAKGQPREPQVYTLPPSREEMTKNQVSLTCLVKGFYPSDIAVEWESNGQPENNYKTTPPVLDSDGSFFLYSKLTVDKSRWQQGNVFSCSVMHEALHNHYTQKSLSLSPG

SEQ ID NO: 318 - protein, 339 aa, Artificial Sequence
  source: /note="Description of Artificial Sequence: Synthetic anti-hHER2-HC-A339-DSLEFIASKLA-K340 polypeptide"
STKGPSVFPLAPSSKSTSGGTAALGCLVKDYFPEPVTVSWNSGALTSGVHTFPAVLQSSGLYSLSSVVTVPSSSLGTQTYICNVNHKPSNTKVDKKVEPKSCDKTHTCPPCPAPELLGGPSVFLFPPKPKDTLMISRTPEVTCVVVDVSHEDPEVKFNWYVDGVEVHNAKTKPREEQYNSTYRVVSVLTVLHQDWLNGKEYKCKVSNKALPAPIEKTISKADSLEFIASKLAKGQPREPQVYTLPPSREEMTKNQVSLTCLVKGFYPSDIAVEWESNGQPENNYKTTPPVLDSDGSFFLYSKLTVDKSRWQQGNVFSCSVMHEALHNHYTQKSLSLSPG

SEQ ID NO: 319 - protein, 339 aa, Artificial Sequence
  source: /note="Description of Artificial Sequence: Synthetic anti-hHER2-HC-K340-DSLEFIASKLA-G341 polypeptide"
STKGPSVFPLAPSSKSTSGGTAALGCLVKDYFPEPVTVSWNSGALTSGVHTFPAVLQSSGLYSLSSVVTVPSSSLGTQTYICNVNHKPSNTKVDKKVEPKSCDKTHTCPPCPAPELLGGPSVFLFPPKPKDTLMISRTPEVTCVVVDVSHEDPEVKFNWYVDGVEVHNAKTKPREEQYNSTYRVVSVLTVLHQDWLNGKEYKCKVSNKALPAPIEKTISKAKDSLEFIASKLAGQPREPQVYTLPPSREEMTKNQVSLTCLVKGFYPSDIAVEWESNGQPENNYKTTPPVLDSDGSFFLYSKLTVDKSRWQQGNVFSCSVMHEALHNHYTQKSLSLSPG

SEQ ID NO: 320 - protein, 339 aa, Artificial Sequence
  source: /note="Description of Artificial Sequence: Synthetic anti-hHER2-HC-G341-DSLEFIASKLA-Q342 polypeptide"
STKGPSVFPLAPSSKSTSGGTAALGCLVKDYFPEPVTVSWNSGALTSGVHTFPAVLQSSGLYSLSSVVTVPSSSLGTQTYICNVNHKPSNTKVDKKVEPKSCDKTHTCPPCPAPELLGGPSVFLFPPKPKDTLMISRTPEVTCVVVDVSHEDPEVKFNWYVDGVEVHNAKTKPREEQYNSTYRVVSVLTVLHQDWLNGKEYKCKVSNKALPAPIEKTISKAKGDSLEFIASKLAQPREPQVYTLPPSREEMTKNQVSLTCLVKGFYPSDIAVEWESNGQPENNYKTTPPVLDSDGSFFLYSKLTVDKSRWQQGNVFSCSVMHEALHNHYTQKSLSLSPG

SEQ ID NO: 321 - protein, 339 aa, Artificial Sequence
  source: /note="Description of Artificial Sequence: Synthetic anti-hHER2-HC-Q342-DSLEFIASKLA-P343 polypeptide"
STKGPSVFPLAPSSKSTSGGTAALGCLVKDYFPEPVTVSWNSGALTSGVHTFPAVLQSSGLYSLSSVVTVPSSSLGTQTYICNVNHKPSNTKVDKKVEPKSCDKTHTCPPCPAPELLGGPSVFLFPPKPKDTLMISRTPEVTCVVVDVSHEDPEVKFNWYVDGVEVHNAKTKPREEQYNSTYRVVSVLTVLHQDWLNGKEYKCKVSNKALPAPIEKTISKAKGQDSLEFIASKLAPREPQVYTLPPSREEMTKNQVSLTCLVKGFYPSDIAVEWESNGQPENNYKTTPPVLDSDGSFFLYSKLTVDKSRWQQGNVFSCSVMHEALHNHYTQKSLSLSPG

SEQ ID NO: 322 - protein, 339 aa, Artificial Sequence
  source: /note="Description of Artificial Sequence: Synthetic anti-hHER2-HC-P343-DSLEFIASKLA-R344 polypeptide"
STKGPSVFPLAPSSKSTSGGTAALGCLVKDYFPEPVTVSWNSGALTSGVHTFPAVLQSSGLYSLSSVVTVPSSSLGTQTYICNVNHKPSNTKVDKKVEPKSCDKTHTCPPCPAPELLGGPSVFLFPPKPKDTLMISRTPEVTCVVVDVSHEDPEVKFNWYVDGVEVHNAKTKPREEQYNSTYRVVSVLTVLHQDWLNGKEYKCKVSNKALPAPIEKTISKAKGQPDSLEFIASKLAREPQVYTLPPSREEMTKNQVSLTCLVKGFYPSDIAVEWESNGQPENNYKTTPPVLDSDGSFFLYSKLTVDKSRWQQGNVFSCSVMHEALHNHYTQKSLSLSPG

SEQ ID NO: 323 - protein, 339 aa, Artificial Sequence
  source: /note="Description of Artificial Sequence: Synthetic anti-hHER2-HC-R344-DSLEFIASKLA-E345 polypeptide"
STKGPSVFPLAPSSKSTSGGTAALGCLVKDYFPEPVTVSWNSGALTSGVHTFPAVLQSSGLYSLSSVVTVPSSSLGTQTYICNVNHKPSNTKVDKKVEPKSCDKTHTCPPCPAPELLGGPSVFLFPPKPKDTLMISRTPEVTCVVVDVSHEDPEVKFNWYVDGVEVHNAKTKPREEQYNSTYRVVSVLTVLHQDWLNGKEYKCKVSNKALPAPIEKTISKAKGQPRDSLEFIASKLAEPQVYTLPPSREEMTKNQVSLTCLVKGFYPSDIAVEWESNGQPENNYKTTPPVLDSDGSFFLYSKLTVDKSRWQQGNVFSCSVMHEALHNHYTQKSLSLSPG

SEQ ID NO: 324 - protein, 339 aa, Artificial Sequence
  source: /note="Description of Artificial Sequence: Synthetic anti-hHER2-HC-R355-DSLEFIASKLA-E356 polypeptide"
STKGPSVFPLAPSSKSTSGGTAALGCLVKDYFPEPVTVSWNSGALTSGVHTFPAVLQSSGLYSLSSVVTVPSSSLGTQTYICNVNHKPSNTKVDKKVEPKSCDKTHTCPPCPAPELLGGPSVFLFPPKPKDTLMISRTPEVTCVVVDVSHEDPEVKFNWYVDGVEVHNAKTKPREEQYNSTYRVVSVLTVLHQDWLNGKEYKCKVSNKALPAPIEKTISKAKGQPREPQVYTLPPSRDSLEFIASKLAEEMTKNQVSLTCLVKGFYPSDIAVEWESNGQPENNYKTTPPVLDSDGSFFLYSKLTVDKSRWQQGNVFSCSVMHEALHNHYTQKSLSLSPG

SEQ ID NO: 325 - protein, 339 aa, Artificial Sequence
  source: /note="Description of Artificial Sequence: Synthetic anti-hHER2-HC-E356-DSLEFIASKLA-E357 polypeptide"
STKGPSVFPLAPSSKSTSGGTAALGCLVKDYFPEPVTVSWNSGALTSGVHTFPAVLQSSGLYSLSSVVTVPSSSLGTQTYICNVNHKPSNTKVDKKVEPKSCDKTHTCPPCPAPELLGGPSVFLFPPKPKDTLMISRTPEVTCVVVDVSHEDPEVKFNWYVDGVEVHNAKTKPREEQYNSTYRVVSVLTVLHQDWLNGKEYKCKVSNKALPAPIEKTISKAKGQPREPQVYTLPPSREDSLEFIASKLAEMTKNQVSLTCLVKGFYPSDIAVEWESNGQPENNYKTTPPVLDSDGSFFLYSKLTVDKSRWQQGNVFSCSVMHEALHNHYTQKSLSLSPG

SEQ ID NO: 326 - protein, 339 aa, Artificial Sequence
  source: /note="Description of Artificial Sequence: Synthetic anti-hHER2-HC-E357-DSLEFIASKLA-M358 polypeptide"
STKGPSVFPLAPSSKSTSGGTAALGCLVKDYFPEPVTVSWNSGALTSGVHTFPAVLQSSGLYSLSSVVTVPSSSLGTQTYICNVNHKPSNTKVDKKVEPKSCDKTHTCPPCPAPELLGGPSVFLFPPKPKDTLMISRTPEVTCVVVDVSHEDPEVKFNWYVDGVEVHNAKTKPREEQYNSTYRVVSVLTVLHQDWLNGKEYKCKVSNKALPAPIEKTISKAKGQPREPQVYTLPPSREEDSLEFIASKLAMTKNQVSLTCLVKGFYPSDIAVEWESNGQPENNYKTTPPVLDSDGSFFLYSKLTVDKSRWQQGNVFSCSVMHEALHNHYTQKSLSLSPG

SEQ ID NO: 327 - protein, 339 aa, Artificial Sequence
  source: /note="Description of Artificial Sequence: Synthetic anti-hHER2-HC-M358-DSLEFIASKLA-T359 polypeptide"
STKGPSVFPLAPSSKSTSGGTAALGCLVKDYFPEPVTVSWNSGALTSGVHTFPAVLQSSGLYSLSSVVTVPSSSLGTQTYICNVNHKPSNTKVDKKVEPKSCDKTHTCPPCPAPELLGGPSVFLFPPKPKDTLMISRTPEVTCVVVDVSHEDPEVKFNWYVDGVEVHNAKTKPREEQYNSTYRVVSVLTVLHQDWLNGKEYKCKVSNKALPAPIEKTISKAKGQPREPQVYTLPPSREEMDSLEFIASKLATKNQVSLTCLVKGFYPSDIAVEWESNGQPENNYKTTPPVLDSDGSFFLYSKLTVDKSRWQQGNVFSCSVMHEALHNHYTQKSLSLSPG

SEQ ID NO: 328 - protein, 339 aa, Artificial Sequence
  source: /note="Description of Artificial Sequence: Synthetic anti-hHER2-HC-K360-DSLEFIASKLA-N361 polypeptide"
STKGPSVFPLAPSSKSTSGGTAALGCLVKDYFPEPVTVSWNSGALTSGVHTFPAVLQSSGLYSLSSVVTVPSSSLGTQTYICNVNHKPSNTKVDKKVEPKSCDKTHTCPPCPAPELLGGPSVFLFPPKPKDTLMISRTPEVTCVVVDVSHEDPEVKFNWYVDGVEVHNAKTKPREEQYNSTYRVVSVLTVLHQDWLNGKEYKCKVSNKALPAPIEKTISKAKGQPREPQVYTLPPSREEMTKDSLEFIASKLANQVSLTCLVKGFYPSDIAVEWESNGQPENNYKTTPPVLDSDGSFFLYSKLTVDKSRWQQGNVFSCSVMHEALHNHYTQKSLSLSPG

SEQ ID NO: 329 - protein, 339 aa, Artificial Sequence
  source: /note="Description of Artificial Sequence: Synthetic anti-hHER2-HC-N384-DSLEFIASKLA-G385 polypeptide"
STKGPSVFPLAPSSKSTSGGTAALGCLVKDYFPEPVTVSWNSGALTSGVHTFPAVLQSSGLYSLSSVVTVPSSSLGTQTYICNVNHKPSNTKVDKKVEPKSCDKTHTCPPCPAPELLGGPSVFLFPPKPKDTLMISRTPEVTCVVVDVSHEDPEVKFNWYVDGVEVHNAKTKPREEQYNSTYRVVSVLTVLHQDWLNGKEYKCKVSNKALPAPIEKTISKAKGQPREPQVYTLPPSREEMTKNQVSLTCLVKGFYPSDIAVEWESNDSLEFIASKLAGQPENNYKTTPPVLDSDGSFFLYSKLTVDKSRWQQGNVFSCSVMHEALHNHYTQKSLSLSPG

SEQ ID NO: 330 - protein, 339 aa, Artificial Sequence
  source: /note="Description of Artificial Sequence: Synthetic anti-hHER2-HC-N389-DSLEFIASKLA-N390 polypeptide"
STKGPSVFPLAPSSKSTSGGTAALGCLVKDYFPEPVTVSWNSGALTSGVHTFPAVLQSSGLYSLSSVVTVPSSSLGTQTYICNVNHKPSNTKVDKKVEPKSCDKTHTCPPCPAPELLGGPSVFLFPPKPKDTLMISRTPEVTCVVVDVSHEDPEVKFNWYVDGVEVHNAKTKPREEQYNSTYRVVSVLTVLHQDWLNGKEYKCKVSNKALPAPIEKTISKAKGQPREPQVYTLPPSREEMTKNQVSLTCLVKGFYPSDIAVEWESNGQPENDSLEFIASKLANYKTTPPVLDSDGSFFLYSKLTVDKSRWQQGNVFSCSVMHEALHNHYTQKSLSLSPG

SEQ ID NO: 331 - protein, 339 aa, Artificial Sequence
  source: /note="Description of Artificial Sequence: Synthetic anti-hHER2-HC-T394-DSLEFIASKLA-P395 polypeptide"
STKGPSVFPLAPSSKSTSGGTAALGCLVKDYFPEPVTVSWNSGALTSGVHTFPAVLQSSGLYSLSSVVTVPSSSLGTQTYICNVNHKPSNTKVDKKVEPKSCDKTHTCPPCPAPELLGGPSVFLFPPKPKDTLMISRTPEVTCVVVDVSHEDPEVKFNWYVDGVEVHNAKTKPREEQYNSTYRVVSVLTVLHQDWLNGKEYKCKVSNKALPAPIEKTISKAKGQPREPQVYTLPPSREEMTKNQVSLTCLVKGFYPSDIAVEWESNGQPENNYKTTDSLEFIASKLAPPVLDSDGSFFLYSKLTVDKSRWQQGNVFSCSVMHEALHNHYTQKSLSLSPG

SEQ ID NO: 332 - protein, 339 aa, Artificial Sequence
  source: /note="Description of Artificial Sequence: Synthetic anti-hHER2-HC-P395-DSLEFIASKLA-P396 polypeptide"
STKGPSVFPLAPSSKSTSGGTAALGCLVKDYFPEPVTVSWNSGALTSGVHTFPAVLQSSGLYSLSSVVTVPSSSLGTQTYICNVNHKPSNTKVDKKVEPKSCDKTHTCPPCPAPELLGGPSVFLFPPKPKDTLMISRTPEVTCVVVDVSHEDPEVKFNWYVDGVEVHNAKTKPREEQYNSTYRVVSVLTVLHQDWLNGKEYKCKVSNKALPAPIEKTISKAKGQPREPQVYTLPPSREEMTKNQVSLTCLVKGFYPSDIAVEWESNGQPENNYKTTPDSLEFIASKLAPVLDSDGSFFLYSKLTVDKSRWQQGNVFSCSVMHEALHNHYTQKSLSLSPG

SEQ ID NO: 333 - protein, 339 aa, Artificial Sequence
  source: /note="Description of Artificial Sequence: Synthetic anti-hHER2-HC-D399-DSLEFIASKLA-S400 polypeptide"
STKGPSVFPLAPSSKSTSGGTAALGCLVKDYFPEPVTVSWNSGALTSGVHTFPAVLQSSGLYSLSSVVTVPSSSLGTQTYICNVNHKPSNTKVDKKVEPKSCDKTHTCPPCPAPELLGGPSVFLFPPKPKDTLMISRTPEVTCVVVDVSHEDPEVKFNWYVDGVEVHNAKTKPREEQYNSTYRVVSVLTVLHQDWLNGKEYKCKVSNKALPAPIEKTISKAKGQPREPQVYTLPPSREEMTKNQVSLTCLVKGFYPSDIAVEWESNGQPENNYKTTPPVLDDSLEFIASKLASDGSFFLYSKLTVDKSRWQQGNVFSCSVMHEALHNHYTQKSLSLSPG

SEQ ID NO: 334 - protein, 339 aa, Artificial Sequence
  source: /note="Description of Artificial Sequence: Synthetic anti-hHER2-HC-S400-DSLEFIASKLA-D401 polypeptide"
STKGPSVFPLAPSSKSTSGGTAALGCLVKDYFPEPVTVSWNSGALTSGVHTFPAVLQSSGLYSLSSVVTVPSSSLGTQTYICNVNHKPSNTKVDKKVEPKSCDKTHTCPPCPAPELLGGPSVFLFPPKPKDTLMISRTPEVTCVVVDVSHEDPEVKFNWYVDGVEVHNAKTKPREEQYNSTYRVVSVLTVLHQDWLNGKEYKCKVSNKALPAPIEKTISKAKGQPREPQVYTLPPSREEMTKNQVSLTCLVKGFYPSDIAVEWESNGQPENNYKTTPPVLDSDSLEFIASKLADGSFFLYSKLTVDKSRWQQGNVFSCSVMHEALHNHYTQKSLSLSPG

SEQ ID NO: 335 - protein, 339 aa, Artificial Sequence
  source: /note="Description of Artificial Sequence: Synthetic anti-hHER2-HC-D401-DSLEFIASKLA-G402 polypeptide"
STKGPSVFPLAPSSKSTSGGTAALGCLVKDYFPEPVTVSWNSGALTSGVHTFPAVLQSSGLYSLSSVVTVPSSSLGTQTYICNVNHKPSNTKVDKKVEPKSCDKTHTCPPCPAPELLGGPSVFLFPPKPKDTLMISRTPEVTCVVVDVSHEDPEVKFNWYVDGVEVHNAKTKPREEQYNSTYRVVSVLTVLHQDWLNGKEYKCKVSNKALPAPIEKTISKAKGQPREPQVYTLPPSREEMTKNQVSLTCLVKGFYPSDIAVEWESNGQPENNYKTTPPVLDSDDSLEFIASKLAGSFFLYSKLTVDKSRWQQGNVFSCSVMHEALHNHYTQKSLSLSPG

SEQ ID NO: 336 - protein, 339 aa, Artificial Sequence
  source: /note="Description of Artificial Sequence: Synthetic anti-hHER2-HC-S415-DSLEFIASKLA-R416 polypeptide"
STKGPSVFPLAPSSKSTSGGTAALGCLVKDYFPEPVTVSWNSGALTSGVHTFPAVLQSSGLYSLSSVVTVPSSSLGTQTYICNVNHKPSNTKVDKKVEPKSCDKTHTCPPCPAPELLGGPSVFLFPPKPKDTLMISRTPEVTCVVVDVSHEDPEVKFNWYVDGVEVHNAKTKPREEQYNSTYRVVSVLTVLHQDWLNGKEYKCKVSNKALPAPIEKTISKAKGQPREPQVYTLPPSREEMTKNQVSLTCLVKGFYPSDIAVEWESNGQPENNYKTTPPVLDSDGSFFLYSKLTVDKSDSLEFIASKLARWQQGNVFSCSVMHEALHNHYTQKSLSLSPG

SEQ ID NO: 337 - protein, 339 aa, Artificial Sequence
  source: /note="Description of Artificial Sequence: Synthetic anti-hHER2-HC-R416-DSLEFIASKLA-W417 polypeptide"
STKGPSVFPLAPSSKSTSGGTAALGCLVKDYFPEPVTVSWNSGALTSGVHTFPAVLQSSGLYSLSSVVTVPSSSLGTQTYICNVNHKPSNTKVDKKVEPKSCDKTHTCPPCPAPELLGGPSVFLFPPKPKDTLMISRTPEVTCVVVDVSHEDPEVKFNWYVDGVEVHNAKTKPREEQYNSTYRVVSVLTVLHQDWLNGKEYKCKVSNKALPAPIEKTISKAKGQPREPQVYTLPPSREEMTKNQVSLTCLVKGFYPSDIAVEWESNGQPENNYKTTPPVLDSDGSFFLYSKLTVDKSRDSLEFIASKLAWQQGNVFSCSVMHEALHNHYTQKSLSLSPG

SEQ ID NO: 338 - protein, 339 aa, Artificial Sequence
  source: /note="Description of Artificial Sequence: Synthetic anti-hHER2-HC-W417-DSLEFIASKLA-Q418 polypeptide"
STKGPSVFPLAPSSKSTSGGTAALGCLVKDYFPEPVTVSWNSGALTSGVHTFPAVLQSSGLYSLSSVVTVPSSSLGTQTYICNVNHKPSNTKVDKKVEPKSCDKTHTCPPCPAPELLGGPSVFLFPPKPKDTLMISRTPEVTCVVVDVSHEDPEVKFNWYVDGVEVHNAKTKPREEQYNSTYRVVSVLTVLHQDWLNGKEYKCKVSNKALPAPIEKTISKAKGQPREPQVYTLPPSREEMTKNQVSLTCLVKGFYPSDIAVEWESNGQPENNYKTTPPVLDSDGSFFLYSKLTVDKSRWDSLEFIASKLAQQGNVFSCSVMHEALHNHYTQKSLSLSPG

SEQ ID NO: 339 - protein, 339 aa, Artificial Sequence
  source: /note="Description of Artificial Sequence: Synthetic anti-hHER2-HC-Q418-DSLEFIASKLA-Q419 polypeptide"
STKGPSVFPLAPSSKSTSGGTAALGCLVKDYFPEPVTVSWNSGALTSGVHTFPAVLQSSGLYSLSSVVTVPSSSLGTQTYICNVNHKPSNTKVDKKVEPKSCDKTHTCPPCPAPELLGGPSVFLFPPKPKDTLMISRTPEVTCVVVDVSHEDPEVKFNWYVDGVEVHNAKTKPREEQYNSTYRVVSVLTVLHQDWLNGKEYKCKVSNKALPAPIEKTISKAKGQPREPQVYTLPPSREEMTKNQVSLTCLVKGFYPSDIAVEWESNGQPENNYKTTPPVLDSDGSFFLYSKLTVDKSRWQDSLEFIASKLAQGNVFSCSVMHEALHNHYTQKSLSLSPG

SEQ ID NO: 340 - protein, 339 aa, Artificial Sequence
  source: /note="Description of Artificial Sequence: Synthetic anti-hHER2-HC-Q419-DSLEFIASKLA-G420 polypeptide"
STKGPSVFPLAPSSKSTSGGTAALGCLVKDYFPEPVTVSWNSGALTSGVHTFPAVLQSSGLYSLSSVVTVPSSSLGTQTYICNVNHKPSNTKVDKKVEPKSCDKTHTCPPCPAPELLGGPSVFLFPPKPKDTLMISRTPEVTCVVVDVSHEDPEVKFNWYVDGVEVHNAKTKPREEQYNSTYRVVSVLTVLHQDWLNGKEYKCKVSNKALPAPIEKTISKAKGQPREPQVYTLPPSREEMTKNQVSLTCLVKGFYPSDIAVEWESNGQPENNYKTTPPVLDSDGSFFLYSKLTVDKSRWQQDSLEFIASKLAGNVFSCSVMHEALHNHYTQKSLSLSPG

SEQ ID NO: 341 - protein, 339 aa, Artificial Sequence
  source: /note="Description of Artificial Sequence: Synthetic anti-hHER2-HC-G420-DSLEFIASKLA-N421 polypeptide"
STKGPSVFPLAPSSKSTSGGTAALGCLVKDYFPEPVTVSWNSGALTSGVHTFPAVLQSSGLYSLSSVVTVPSSSLGTQTYICNVNHKPSNTKVDKKVEPKSCDKTHTCPPCPAPELLGGPSVFLFPPKPKDTLMISRTPEVTCVVVDVSHEDPEVKFNWYVDGVEVHNAKTKPREEQYNSTYRVVSVLTVLHQDWLNGKEYKCKVSNKALPAPIEKTISKAKGQPREPQVYTLPPSREEMTKNQVSLTCLVKGFYPSDIAVEWESNGQPENNYKTTPPVLDSDGSFFLYSKLTVDKSRWQQGDSLEFIASKLANVFSCSVMHEALHNHYTQKSLSLSPG

SEQ ID NO: 342 - protein, 339 aa, Artificial Sequence
  source: /note="Description of Artificial Sequence: Synthetic anti-hHER2-HC-N421-DSLEFIASKLA-V422 polypeptide"
STKGPSVFPLAPSSKSTSGGTAALGCLVKDYFPEPVTVSWNSGALTSGVHTFPAVLQSSGLYSLSSVVTVPSSSLGTQTYICNVNHKPSNTKVDKKVEPKSCDKTHTCPPCPAPELLGGPSVFLFPPKPKDTLMISRTPEVTCVVVDVSHEDPEVKFNWYVDGVEVHNAKTKPREEQYNSTYRVVSVLTVLHQDWLNGKEYKCKVSNKALPAPIEKTISKAKGQPREPQVYTLPPSREEMTKNQVSLTCLVKGFYPSDIAVEWESNGQPENNYKTTPPVLDSDGSFFLYSKLTVDKSRWQQGNDSLEFIASKLAVFSCSVMHEALHNHYTQKSLSLSPG

SEQ ID NO: 343 - protein, 339 aa, Artificial Sequence
  source: /note="Description of Artificial Sequence: Synthetic anti-hHER2-HC-H433-DSLEFIASKLA-N434 polypeptide"
STKGPSVFPLAPSSKSTSGGTAALGCLVKDYFPEPVTVSWNSGALTSGVHTFPAVLQSSGLYSLSSVVTVPSSSLGTQTYICNVNHKPSNTKVDKKVEPKSCDKTHTCPPCPAPELLGGPSVFLFPPKPKDTLMISRTPEVTCVVVDVSHEDPEVKFNWYVDGVEVHNAKTKPREEQYNSTYRVVSVLTVLHQDWLNGKEYKCKVSNKALPAPIEKTISKAKGQPREPQVYTLPPSREEMTKNQVSLTCLVKGFYPSDIAVEWESNGQPENNYKTTPPVLDSDGSFFLYSKLTVDKSRWQQGNVFSCSVMHEALHDSLEFIASKLANHYTQKSLSLSPG

SEQ ID NO: 344 - protein, 339 aa, Artificial Sequence
  source: /note="Description of Artificial Sequence: Synthetic anti-hHER2-HC-N434-DSLEFIASKLA-H435 polypeptide"
STKGPSVFPLAPSSKSTSGGTAALGCLVKDYFPEPVTVSWNSGALTSGVHTFPAVLQSSGLYSLSSVVTVPSSSLGTQTYICNVNHKPSNTKVDKKVEPKSCDKTHTCPPCPAPELLGGPSVFLFPPKPKDTLMISRTPEVTCVVVDVSHEDPEVKFNWYVDGVEVHNAKTKPREEQYNSTYRVVSVLTVLHQDWLNGKEYKCKVSNKALPAPIEKTISKAKGQPREPQVYTLPPSREEMTKNQVSLTCLVKGFYPSDIAVEWESNGQPENNYKTTPPVLDSDGSFFLYSKLTVDKSRWQQGNVFSCSVMHEALHNDSLEFIASKLAHYTQKSLSLSPG

SEQ ID NO: 345 - protein, 339 aa, Artificial Sequence
  source: /note="Description of Artificial Sequence: Synthetic anti-hHER2-HC-S442-DSLEFIASKLA-L443 polypeptide"
STKGPSVFPLAPSSKSTSGGTAALGCLVKDYFPEPVTVSWNSGALTSGVHTFPAVLQSSGLYSLSSVVTVPSSSLGTQTYICNVNHKPSNTKVDKKVEPKSCDKTHTCPPCPAPELLGGPSVFLFPPKPKDTLMISRTPEVTCVVVDVSHEDPEVKFNWYVDGVEVHNAKTKPREEQYNSTYRVVSVLTVLHQDWLNGKEYKCKVSNKALPAPIEKTISKAKGQPREPQVYTLPPSREEMTKNQVSLTCLVKGFYPSDIAVEWESNGQPENNYKTTPPVLDSDGSFFLYSKLTVDKSRWQQGNVFSCSVMHEALHNHYTQKSLSDSLEFIASKLALSPG

SEQ ID NO: 346 - protein, 339 aa, Artificial Sequence
  source: /note="Description of Artificial Sequence: Synthetic anti-hHER2-HC-L443-DSLEFIASKLA-S444 polypeptide"
STKGPSVFPLAPSSKSTSGGTAALGCLVKDYFPEPVTVSWNSGALTSGVHTFPAVLQSSGLYSLSSVVTVPSSSLGTQTYICNVNHKPSNTKVDKKVEPKSCDKTHTCPPCPAPELLGGPSVFLFPPKPKDTLMISRTPEVTCVVVDVSHEDPEVKFNWYVDGVEVHNAKTKPREEQYNSTYRVVSVLTVLHQDWLNGKEYKCKVSNKALPAPIEKTISKAKGQPREPQVYTLPPSREEMTKNQVSLTCLVKGFYPSDIAVEWESNGQPENNYKTTPPVLDSDGSFFLYSKLTVDKSRWQQGNVFSCSVMHEALHNHYTQKSLSLDSLEFIASKLASPG

SEQ ID NO: 347 - protein, 339 aa, Artificial Sequence
  source: /note="Description of Artificial Sequence: Synthetic anti-hHER2-HC-S444-DSLEFIASKLA-P445 polypeptide"
STKGPSVFPLAPSSKSTSGGTAALGCLVKDYFPEPVTVSWNSGALTSGVHTFPAVLQSSGLYSLSSVVTVPSSSLGTQTYICNVNHKPSNTKVDKKVEPKSCDKTHTCPPCPAPELLGGPSVFLFPPKPKDTLMISRTPEVTCVVVDVSHEDPEVKFNWYVDGVEVHNAKTKPREEQYNSTYRVVSVLTVLHQDWLNGKEYKCKVSNKALPAPIEKTISKAKGQPREPQVYTLPPSREEMTKNQVSLTCLVKGFYPSDIAVEWESNGQPENNYKTTPPVLDSDGSFFLYSKLTVDKSRWQQGNVFSCSVMHEALHNHYTQKSLSLSDSLEFIASKLAPG

SEQ ID NO: 348 - protein, 339 aa, Artificial Sequence
  source: /note="Description of Artificial Sequence: Synthetic anti-hHER2-HC-P445-DSLEFIASKLA-G446 polypeptide"
STKGPSVFPLAPSSKSTSGGTAALGCLVKDYFPEPVTVSWNSGALTSGVHTFPAVLQSSGLYSLSSVVTVPSSSLGTQTYICNVNHKPSNTKVDKKVEPKSCDKTHTCPPCPAPELLGGPSVFLFPPKPKDTLMISRTPEVTCVVVDVSHEDPEVKFNWYVDGVEVHNAKTKPREEQYNSTYRVVSVLTVLHQDWLNGKEYKCKVSNKALPAPIEKTISKAKGQPREPQVYTLPPSREEMTKNQVSLTCLVKGFYPSDIAVEWESNGQPENNYKTTPPVLDSDGSFFLYSKLTVDKSRWQQGNVFSCSVMHEALHNHYTQKSLSLSPDSLEFIASKLAG

SEQ ID NO: 349 - protein, 339 aa, Artificial Sequence
  source: /note="Description of Artificial Sequence: Synthetic anti-hHER2-HC-G446-DSLEFIASKLA-K447 polypeptide"
STKGPSVFPLAPSSKSTSGGTAALGCLVKDYFPEPVTVSWNSGALTSGVHTFPAVLQSSGLYSLSSVVTVPSSSLGTQTYICNVNHKPSNTKVDKKVEPKSCDKTHTCPPCPAPELLGGPSVFLFPPKPKDTLMISRTPEVTCVVVDVSHEDPEVKFNWYVDGVEVHNAKTKPREEQYNSTYRVVSVLTVLHQDWLNGKEYKCKVSNKALPAPIEKTISKAKGQPREPQVYTLPPSREEMTKNQVSLTCLVKGFYPSDIAVEWESNGQPENNYKTTPPVLDSDGSFFLYSKLTVDKSRWQQGNVFSCSVMHEALHNHYTQKSLSLSPGDSLEFIASKLA

SEQ ID NO: 350 - protein, 237 aa, Bacillus subtilis
  source: /note="Sfp enzyme (with TEV protease cleavage site)"
MKIYGIYMDRPLSQEENERFMSFISPEKREKCRRFYHKEDAHRTLLGDVLVRSVISRQYQLDKSDIRFSTQEYGKPCIPDLPDAHFNISHSGRWVICAFDSQPIGIDIEKTKPISLEIAKRFFSKTEYSDLLAKDKDEQTDYFYHLWSMKESFIKQEGKGLSLPLDSFSVRLHQDGQVSIELPDSHSPCYIKTYEVDPGYKMAVCAAHPDFPEDITMVSYEELLENLYFQGHHHHHH

SEQ ID NO: 351 - protein, 230 aa, Bacillus subtilis
  source: /note="Sfp enzyme (without TEV protease cleavage site)"
MKIYGIYMDRPLSQEENERFMSFISPEKREKCRRFYHKEDAHRTLLGDVLVRSVISRQYQLDKSDIRFSTQEYGKPCIPDLPDAHFNISHSGRWVICAFDSQPIGIDIEKTKPISLEIAKRFFSKTEYSDLLAKDKDEQTDYFYHLWSMKESFIKQEGKGLSLPLDSFSVRLHQDGQVSIELPDSHSPCYIKTYEVDPGYKMAVCAAHPDFPEDITMVSYEELLHHHHHH

SEQ ID NO: 352 - protein, 237 aa, Bacillus subtilis
  source: /note="Sfp mutant R4-4 (with TEV protease cleavage site)"
MKIYGIYMDRPLSQEENERFMSFISPEEREKCRRFYHKEDAHRELLGDVLVRSVISRQYQLDKSDIRFSTQEYGKPYIPDLPDAHFNISHSGRWVICAFDSQPIGIDIEKTKPISLEIAKRFFSKTEYSDLLAKDKDEQTDYFYHLWSMKESFIKQEGKGLSLPLDSFSVRLHQDGQVSIELPDSHSPCYIKTYEVDPGYKMAVCAAHPDFPEDITMVSYEELLENLYFQGHHHHHH

SEQ ID NO: 353 - protein, 132 aa, Escherichia coli
  source: /note="AcpS enzyme"
MAILGLGTDIVEIARIEAVIARSGDRLARRVLSDNEWAIWKTHHQPVRFLAKRFAVKEAAAKAFGTGIRNGLAFNQFEVFNDELGKPRLRLWGEALKLAEKLGVANMHVTLADERHYACATVIIESHHHHHH

SEQ ID NO: 354 - protein, 180 aa, Thermotoga maritima
  source: /note="PPTase"
GSDKIHHHHHHMIVGVGIDVLEVERVPEKFAERILGESEKRLFLTRKRRREFIAGRFALKEAFFKALGTGLNGHSFTDVEFLESNGKPVLCVHKDFGFFNYAHVSLSHDRFAVALVVLEKRKGDIIVEGDESFLRKRFEVLERSVEGWEIETSLPPFTLKKLLESSGCRLVRYGNILIGE

SEQ ID NO: 355 - protein, 24 aa, Artificial Sequence
  source: /note="Description of Artificial Sequence: Synthetic signal peptide for protein secretion"
MKTFILLLWVLLLWVIFLLPGATA

SEQ ID NO: 356 - protein, 340 aa, Artificial Sequence
  source: /note="Description of Artificial Sequence: Synthetic mAb2-HC-E388-GDSLDMLEWSLM-N389 polypeptide"
STKGPSVFPLAPSSKSTSGGTAALGCLVKDYFPEPVTVSWNSGALTSGVHTFPAVLQSSGLYSLSSVVTVPSSSLGTQTYICNVNHKPSNTKVDKRVEPKSCDKTHTCPPCPAPELLGGPSVFLFPPKPKDTLMISRTPEVTCVVVDVSHEDPEVKFNWYVDGVEVHNAKTKPREEQYNSTYRVVSVLTVLHQDWLNGKEYKCKVSNKALPAPIEKTISKAKGQPREPQVYTLPPSREEMTKNQVSLTCLVKGFYPSDIAVEWESNGQPEGDSLDMLEWSLMNNYKTTPPVLDSDGSFFLYSKLTVDKSRWQQGNVFSCSVMHEALHNHYTQKSLSLSPG

SEQ ID NO: 357 - protein, 340 aa, Artificial Sequence
  source: /note="Description of Artificial Sequence: Synthetic anti-hHER2-HC-A118-GDSLDMLEWSLM-S119 polypeptide"
GDSLDMLEWSLMSTKGPSVFPLAPSSKSTSGGTAALGCLVKDYFPEPVTVSWNSGALTSGVHTFPAVLQSSGLYSLSSVVTVPSSSLGTQTYICNVNHKPSNTKVDKKVEPKSCDKTHTCPPCPAPELLGGPSVFLFPPKPKDTLMISRTPEVTCVVVDVSHEDPEVKFNWYVDGVEVHNAKTKPREEQYNSTYRVVSVLTVLHQDWLNGKEYKCKVSNKALPAPIEKTISKAKGQPREPQVYTLPPSREEMTKNQVSLTCLVKGFYPSDIAVEWESNGQPENNYKTTPPVLDSDGSFFLYSKLTVDKSRWQQGNVFSCSVMHEALHNHYTQKSLSLSPG

SEQ ID NO: 358 - protein, 340 aa, Artificial Sequence
  source: /note="Description of Artificial Sequence: Synthetic anti-hHER2-HC-S119-GDSLDMLEWSLM-T120 polypeptide"
SGDSLDMLEWSLMTKGPSVFPLAPSSKSTSGGTAALGCLVKDYFPEPVTVSWNSGALTSGVHTFPAVLQSSGLYSLSSVVTVPSSSLGTQTYICNVNHKPSNTKVDKKVEPKSCDKTHTCPPCPAPELLGGPSVFLFPPKPKDTLMISRTPEVTCVVVDVSHEDPEVKFNWYVDGVEVHNAKTKPREEQYNSTYRVVSVLTVLHQDWLNGKEYKCKVSNKALPAPIEKTISKAKGQPREPQVYTLPPSREEMTKNQVSLTCLVKGFYPSDIAVEWESNGQPENNYKTTPPVLDSDGSFFLYSKLTVDKSRWQQGNVFSCSVMHEALHNHYTQKSLSLSPG

SEQ ID NO: 359 - protein, 340 aa, Artificial Sequence
  source: /note="Description of Artificial Sequence: Synthetic anti-hHER2-HC-T120-GDSLDMLEWSLM-K121 polypeptide"
STGDSLDMLEWSLMKGPSVFPLAPSSKSTSGGTAALGCLVKDYFPEPVTVSWNSGALTSGVHTFPAVLQSSGLYSLSSVVTVPSSSLGTQTYICNVNHKPSNTKVDKKVEPKSCDKTHTCPPCPAPELLGGPSVFLFPPKPKDTLMISRTPEVTCVVVDVSHEDPEVKFNWYVDGVEVHNAKTKPREEQYNSTYRVVSVLTVLHQDWLNGKEYKCKVSNKALPAPIEKTISKAKGQPREPQVYTLPPSREEMTKNQVSLTCLVKGFYPSDIAVEWESNGQPENNYKTTPPVLDSDGSFFLYSKLTVDKSRWQQGNVFSCSVMHEALHNHYTQKSLSLSPG

SEQ ID NO: 360 - protein, 340 aa, Artificial Sequence
  source: /note="Description of Artificial Sequence: Synthetic anti-hHER2-HC-S131-GDSLDMLEWSLM-S132 polypeptide"
STKGPSVFPLAPSGDSLDMLEWSLMSKSTSGGTAALGCLVKDYFPEPVTVSWNSGALTSGVHTFPAVLQSSGLYSLSSVVTVPSSSLGTQTYICNVNHKPSNTKVDKKVEPKSCDKTHTCPPCPAPELLGGPSVFLFPPKPKDTLMISRTPEVTCVVVDVSHEDPEVKFNWYVDGVEVHNAKTKPREEQYNSTYRVVSVLTVLHQDWLNGKEYKCKVSNKALPAPIEKTISKAKGQPREPQVYTLPPSREEMTKNQVSLTCLVKGFYPSDIAVEWESNGQPENNYKTTPPVLDSDGSFFLYSKLTVDKSRWQQGNVFSCSVMHEALHNHYTQKSLSLSPG

SEQ ID NO: 361 - protein, 340 aa, Artificial Sequence
  source: /note="Description of Artificial Sequence: Synthetic anti-hHER2-HC-S132-GDSLDMLEWSLM-K133 polypeptide"
STKGPSVFPLAPSSGDSLDMLEWSLMKSTSGGTAALGCLVKDYFPEPVTVSWNSGALTSGVHTFPAVLQSSGLYSLSSVVTVPSSSLGTQTYICNVNHKPSNTKVDKKVEPKSCDKTHTCPPCPAPELLGGPSVFLFPPKPKDTLMISRTPEVTCVVVDVSHEDPEVKFNWYVDGVEVHNAKTKPREEQYNSTYRVVSVLTVLHQDWLNGKEYKCKVSNKALPAPIEKTISKAKGQPREPQVYTLPPSREEMTKNQVSLTCLVKGFYPSDIAVEWESNGQPENNYKTTPPVLDSDGSFFLYSKLTVDKSRWQQGNVFSCSVMHEALHNHYTQKSLSLSPG

SEQ ID NO: 362 - protein, 340 aa, Artificial Sequence
  source: /note="Description of Artificial Sequence: Synthetic anti-hHER2-HC-K133-GDSLDMLEWSLM-S134 polypeptide"
STKGPSVFPLAPSSKGDSLDMLEWSLMSTSGGTAALGCLVKDYFPEPVTVSWNSGALTSGVHTFPAVLQSSGLYSLSSVVTVPSSSLGTQTYICNVNHKPSNTKVDKKVEPKSCDKTHTCPPCPAPELLGGPSVFLFPPKPKDTLMISRTPEVTCVVVDVSHEDPEVKFNWYVDGVEVHNAKTKPREEQYNSTYRVVSVLTVLHQDWLNGKEYKCKVSNKALPAPIEKTISKAKGQPREPQVYTLPPSREEMTKNQVSLTCLVKGFYPSDIAVEWESNGQPENNYKTTPPVLDSDGSFFLYSKLTVDKSRWQQGNVFSCSVMHEALHNHYTQKSLSLSPG

SEQ ID NO: 363 - protein, 340 aa, Artificial Sequence
  source: /note="Description of Artificial Sequence: Synthetic anti-hHER2-HC-S134-GDSLDMLEWSLM-T135 polypeptide"
STKGPSVFPLAPSSKSGDSLDMLEWSLMTSGGTAALGCLVKDYFPEPVTVSWNSGALTSGVHTFPAVLQSSGLYSLSSVVTVPSSSLGTQTYICNVNHKPSNTKVDKKVEPKSCDKTHTCPPCPAPELLGGPSVFLFPPKPKDTLMISRTPEVTCVVVDVSHEDPEVKFNWYVDGVEVHNAKTKPREEQYNSTYRVVSVLTVLHQDWLNGKEYKCKVSNKALPAPIEKTISKAKGQPREPQVYTLPPSREEMTKNQVSLTCLVKGFYPSDIAVEWESNGQPENNYKTTPPVLDSDGSFFLYSKLTVDKSRWQQGNVFSCSVMHEALHNHYTQKSLSLSPG

SEQ ID NO: 364 - protein, 340 aa, Artificial Sequence
  source: /note="Description of Artificial Sequence: Synthetic anti-hHER2-HC-T135-GDSLDMLEWSLM-S136 polypeptide"
STKGPSVFPLAPSSKSTGDSLDMLEWSLMSGGTAALGCLVKDYFPEPVTVSWNSGALTSGVHTFPAVLQSSGLYSLSSVVTVPSSSLGTQTYICNVNHKPSNTKVDKKVEPKSCDKTHTCPPCPAPELLGGPSVFLFPPKPKDTLMISRTPEVTCVVVDVSHEDPEVKFNWYVDGVEVHNAKTKPREEQYNSTYRVVSVLTVLHQDWLNGKEYKCKVSNKALPAPIEKTISKAKGQPREPQVYTLPPSREEMTKNQVSLTCLVKGFYPSDIAVEWESNGQPENNYKTTPPVLDSDGSFFLYSKLTVDKSRWQQGNVFSCSVMHEALHNHYTQKSLSLSPG

SEQ ID NO: 365 - protein, 340 aa, Artificial Sequence
  source: /note="Description of Artificial Sequence: Synthetic anti-hHER2-HC-S136-GDSLDMLEWSLM-G137 polypeptide"
STKGPSVFPLAPSSKSTSGDSLDMLEWSLMGGTAALGCLVKDYFPEPVTVSWNSGALTSGVHTFPAVLQSSGLYSLSSVVTVPSSSLGTQTYICNVNHKPSNTKVDKKVEPKSCDKTHTCPPCPAPELLGGPSVFLFPPKPKDTLMISRTPEVTCVVVDVSHEDPEVKFNWYVDGVEVHNAKTKPREEQYNSTYRVVSVLTVLHQDWLNGKEYKCKVSNKALPAPIEKTISKAKGQPREPQVYTLPPSREEMTKNQVSLTCLVKGFYPSDIAVEWESNGQPENNYKTTPPVLDSDGSFFLYSKLTVDKSRWQQGNVFSCSVMHEALHNHYTQKSLSLSPG

SEQ ID NO: 366 - protein, 340 aa, Artificial Sequence
  source: /note="Description of Artificial Sequence: Synthetic anti-hHER2-HC-G137-GDSLDMLEWSLM-G138 polypeptide"
STKGPSVFPLAPSSKSTSGGDSLDMLEWSLMGTAALGCLVKDYFPEPVTVSWNSGALTSGVHTFPAVLQSSGLYSLSSVVTVPSSSLGTQTYICNVNHKPSNTKVDKKVEPKSCDKTHTCPPCPAPELLGGPSVFLFPPKPKDTLMISRTPEVTCVVVDVSHEDPEVKFNWYVDGVEVHNAKTKPREEQYNSTYRVVSVLTVLHQDWLNGKEYKCKVSNKALPAPIEKTISKAKGQPREPQVYTLPPSREEMTKNQVSLTCLVKGFYPSDIAVEWESNGQPENNYKTTPPVLDSDGSFFLYSKLTVDKSRWQQGNVFSCSVMHEALHNHYTQKSLSLSPG

SEQ ID NO: 367 - protein, 340 aa, Artificial Sequence
  source: /note="Description of Artificial Sequence: Synthetic anti-hHER2-HC-G138-GDSLDMLEWSLM-T139 polypeptide"
STKGPSVFPLAPSSKSTSGGGDSLDMLEWSLMTAALGCLVKDYFPEPVTVSWNSGALTSGVHTFPAVLQSSGLYSLSSVVTVPSSSLGTQTYICNVNHKPSNTKVDKKVEPKSCDKTHTCPPCPAPELLGGPSVFLFPPKPKDTLMISRTPEVTCVVVDVSHEDPEVKFNWYVDGVEVHNAKTKPREEQYNSTYRVVSVLTVLHQDWLNGKEYKCKVSNKALPAPIEKTISKAKGQPREPQVYTLPPSREEMTKNQVSLTCLVKGFYPSDIAVEWESNGQPENNYKTTPPVLDSDGSFFLYSKLTVDKSRWQQGNVFSCSVMHEALHNHYTQKSLSLSPG

SEQ ID NO: 368 - protein, 340 aa, Artificial Sequence
  source: /note="Description of Artificial Sequence: Synthetic anti-hHER2-HC-N159-GDSLDMLEWSLM-S160 polypeptide"
STKGPSVFPLAPSSKSTSGGTAALGCLVKDYFPEPVTVSWNGDSLDMLEWSLMSGALTSGVHTFPAVLQSSGLYSLSSVVTVPSSSLGTQTYICNVNHKPSNTKVDKKVEPKSCDKTHTCPPCPAPELLGGPSVFLFPPKPKDTLMISRTPEVTCVVVDVSHEDPEVKFNWYVDGVEVHNAKTKPREEQYNSTYRVVSVLTVLHQDWLNGKEYKCKVSNKALPAPIEKTISKAKGQPREPQVYTLPPSREEMTKNQVSLTCLVKGFYPSDIAVEWESNGQPENNYKTTPPVLDSDGSFFLYSKLTVDKSRWQQGNVFSCSVMHEALHNHYTQKSLSLSPG

SEQ ID NO: 369 - protein, 340 aa, Artificial Sequence
  source: /note="Description of Artificial Sequence: Synthetic anti-hHER2-HC-S160-GDSLDMLEWSLM-G161 polypeptide"
STKGPSVFPLAPSSKSTSGGTAALGCLVKDYFPEPVTVSWNSGDSLDMLEWSLMGALTSGVHTFPAVLQSSGLYSLSSVVTVPSSSLGTQTYICNVNHKPSNTKVDKKVEPKSCDKTHTCPPCPAPELLGGPSVFLFPPKPKDTLMISRTPEVTCVVVDVSHEDPEVKFNWYVDGVEVHNAKTKPREEQYNSTYRVVSVLTVLHQDWLNGKEYKCKVSNKALPAPIEKTISKAKGQPREPQVYTLPPSREEMTKNQVSLTCLVKGFYPSDIAVEWESNGQPENNYKTTPPVLDSDGSFFLYSKLTVDKSRWQQGNVFSCSVMHEALHNHYTQKSLSLSPG

SEQ ID NO: 370 - protein, 340 aa, Artificial Sequence
  source: /note="Description of Artificial Sequence: Synthetic anti-hHER2-HC-G161-GDSLDMLEWSLM-A162 polypeptide"
STKGPSVFPLAPSSKSTSGGTAALGCLVKDYFPEPVTVSWNSGGDSLDMLEWSLMALTSGVHTFPAVLQSSGLYSLSSVVTVPSSSLGTQTYICNVNHKPSNTKVDKKVEPKSCDKTHTCPPCPAPELLGGPSVFLFPPKPKDTLMISRTPEVTCVVVDVSHEDPEVKFNWYVDGVEVHNAKTKPREEQYNSTYRVVSVLTVLHQDWLNGKEYKCKVSNKALPAPIEKTISKAKGQPREPQVYTLPPSREEMTKNQVSLTCLVKGFYPSDIAVEWESNGQPENNYKTTPPVLDSDGSFFLYSKLTVDKSRWQQGNVFSCSVMHEALHNHYTQKSLSLSPG

SEQ ID NO: 371 - protein, 340 aa, Artificial Sequence
  source: /note="Description of Artificial Sequence: Synthetic anti-hHER2-HC-A162-GDSLDMLEWSLM-L163 polypeptide"
STKGPSVFPLAPSSKSTSGGTAALGCLVKDYFPEPVTVSWNSGAGDSLDMLEWSLMLTSGVHTFPAVLQSSGLYSLSSVVTVPSSSLGTQTYICNVNHKPSNTKVDKKVEPKSCDKTHTCPPCPAPELLGGPSVFLFPPKPKDTLMISRTPEVTCVVVDVSHEDPEVKFNWYVDGVEVHNAKTKPREEQYNSTYRVVSVLTVLHQDWLNGKEYKCKVSNKALPAPIEKTISKAKGQPREPQVYTLPPSREEMTKNQVSLTCLVKGFYPSDIAVEWESNGQPENNYKTTPPVLDSDGSFFLYSKLTVDKSRWQQGNVFSCSVMHEALHNHYTQKSLSLSPG

SEQ ID NO: 372 - protein, 340 aa, Artificial Sequence
  source: /note="Description of Artificial Sequence: Synthetic anti-hHER2-HC-L163-GDSLDMLEWSLM-T164 polypeptide"
STKGPSVFPLAPSSKSTSGGTAALGCLVKDYFPEPVTVSWNSGALGDSLDMLEWSLMTSGVHTFPAVLQSSGLYSLSSVVTVPSSSLGTQTYICNVNHKPSNTKVDKKVEPKSCDKTHTCPPCPAPELLGGPSVFLFPPKPKDTLMISRTPEVTCVVVDVSHEDPEVKFNWYVDGVEVHNAKTKPREEQYNSTYRVVSVLTVLHQDWLNGKEYKCKVSNKALPAPIEKTISKAKGQPREPQVYTLPPSREEMTKNQVSLTCLVKGFYPSDIAVEWESNGQPENNYKTTPPVLDSDGSFFLYSKLTVDKSRWQQGNVFSCSVMHEALHNHYTQKSLSLSPG

SEQ ID NO: 373 - protein, 340 aa, Artificial Sequence
  source: /note="Description of Artificial Sequence: Synthetic anti-hHER2-HC-T164-GDSLDMLEWSLM-S165 polypeptide"
STKGPSVFPLAPSSKSTSGGTAALGCLVKDYFPEPVTVSWNSGALTGDSLDMLEWSLMSGVHTFPAVLQSSGLYSLSSVVTVPSSSLGTQTYICNVNHKPSNTKVDKKVEPKSCDKTHTCPPCPAPELLGGPSVFLFPPKPKDTLMISRTPEVTCVVVDVSHEDPEVKFNWYVDGVEVHNAKTKPREEQYNSTYRVVSVLTVLHQDWLNGKEYKCKVSNKALPAPIEKTISKAKGQPREPQVYTLPPSREEMTKNQVSLTCLVKGFYPSDIAVEWESNGQPENNYKTTPPVLDSDGSFFLYSKLTVDKSRWQQGNVFSCSVMHEALHNHYTQKSLSLSPG

SEQ ID NO: 374 - protein, 340 aa, Artificial Sequence
  source: /note="Description of Artificial Sequence: Synthetic anti-hHER2-HC-S165-GDSLDMLEWSLM-G166 polypeptide"
STKGPSVFPLAPSSKSTSGGTAALGCLVKDYFPEPVTVSWNSGALTSGDSLDMLEWSLMGVHTFPAVLQSSGLYSLSSVVTVPSSSLGTQTYICNVNHKPSNTKVDKKVEPKSCDKTHTCPPCPAPELLGGPSVFLFPPKPKDTLMISRTPEVTCVVVDVSHEDPEVKFNWYVDGVEVHNAKTKPREEQYNSTYRVVSVLTVLHQDWLNGKEYKCKVSNKALPAPIEKTISKAKGQPREPQVYTLPPSREEMTKNQVSLTCLVKGFYPSDIAVEWESNGQPENNYKTTPPVLDSDGSFFLYSKLTVDKSRWQQGNVFSCSVMHEALHNHYTQKSLSLSPG

SEQ ID NO: 375 - protein, 340 aa, Artificial Sequence
  source: /note="Description of Artificial Sequence: Synthetic anti-hHER2-HC-P189-GDSLDMLEWSLM-S190 polypeptide"
STKGPSVFPLAPSSKSTSGGTAALGCLVKDYFPEPVTVSWNSGALTSGVHTFPAVLQSSGLYSLSSVVTVPGDSLDMLEWSLMSSSLGTQTYICNVNHKPSNTKVDKKVEPKSCDKTHTCPPCPAPELLGGPSVFLFPPKPKDTLMISRTPEVTCVVVDVSHEDPEVKFNWYVDGVEVHNAKTKPREEQYNSTYRVVSVLTVLHQDWLNGKEYKCKVSNKALPAPIEKTISKAKGQPREPQVYTLPPSREEMTKNQVSLTCLVKGFYPSDIAVEWESNGQPENNYKTTPPVLDSDGSFFLYSKLTVDKSRWQQGNVFSCSVMHEALHNHYTQKSLSLSPG

SEQ ID NO: 376 - protein, 340 aa, Artificial Sequence
  source: /note="Description of Artificial Sequence: Synthetic anti-hHER2-HC-S190-GDSLDMLEWSLM-S191 polypeptide"
STKGPSVFPLAPSSKSTSGGTAALGCLVKDYFPEPVTVSWNSGALTSGVHTFPAVLQSSGLYSLSSVVTVPSGDSLDMLEWSLMSSLGTQTYICNVNHKPSNTKVDKKVEPKSCDKTHTCPPCPAPELLGGPSVFLFPPKPKDTLMISRTPEVTCVVVDVSHEDPEVKFNWYVDGVEVHNAKTKPREEQYNSTYRVVSVLTVLHQDWLNGKEYKCKVSNKALPAPIEKTISKAKGQPREPQVYTLPPSREEMTKNQVSLTCLVKGFYPSDIAVEWESNGQPENNYKTTPPVLDSDGSFFLYSKLTVDKSRWQQGNVFSCSVMHEALHNHYTQKSLSLSPG

SEQ ID NO: 377 - protein, 340 aa, Artificial Sequence
  source: /note="Description of Artificial Sequence: Synthetic anti-hHER2-HC-S191-GDSLDMLEWSLM-S192 polypeptide"
STKGPSVFPLAPSSKSTSGGTAALGCLVKDYFPEPVTVSWNSGALTSGVHTFPAVLQSSGLYSLSSVVTVPSSGDSLDMLEWSLMSLGTQTYICNVNHKPSNTKVDKKVEPKSCDKTHTCPPCPAPELLGGPSVFLFPPKPKDTLMISRTPEVTCVVVDVSHEDPEVKFNWYVDGVEVHNAKTKPREEQYNSTYRVVSVLTVLHQDWLNGKEYKCKVSNKALPAPIEKTISKAKGQPREPQVYTLPPSREEMTKNQVSLTCLVKGFYPSDIAVEWESNGQPENNYKTTPPVLDSDGSFFLYSKLTVDKSRWQQGNVFSCSVMHEALHNHYTQKSLSLSPG

SEQ ID NO: 378 - protein, 340 aa, Artificial Sequence
  source: /note="Description of Artificial Sequence: Synthetic anti-hHER2-HC-S192-GDSLDMLEWSLM-L193 polypeptide"
STKGPSVFPLAPSSKSTSGGTAALGCLVKDYFPEPVTVSWNSGALTSGVHTFPAVLQSSGLYSLSSVVTVPSSSGDSLDMLEWSLMLGTQTYICNVNHKPSNTKVDKKVEPKSCDKTHTCPPCPAPELLGGPSVFLFPPKPKDTLMISRTPEVTCVVVDVSHEDPEVKFNWYVDGVEVHNAKTKPREEQYNSTYRVVSVLTVLHQDWLNGKEYKCKVSNKALPAPIEKTISKAKGQPREPQVYTLPPSREEMTKNQVSLTCLVKGFYPSDIAVEWESNGQPENNYKTTPPVLDSDGSFFLYSKLTVDKSRWQQGNVFSCSVMHEALHNHYTQKSLSLSPG

SEQ ID NO: 379 - protein, 340 aa, Artificial Sequence
  source: /note="Description of Artificial Sequence: Synthetic anti-hHER2-HC-L193-GDSLDMLEWSLM-G194 polypeptide"
STKGPSVFPLAPSSKSTSGGTAALGCLVKDYFPEPVTVSWNSGALTSGVHTFPAVLQSSGLYSLSSVVTVPSSSLGDSLDMLEWSLMGTQTYICNVNHKPSNTKVDKKVEPKSCDKTHTCPPCPAPELLGGPSVFLFPPKPKDTLMISRTPEVTCVVVDVSHEDPEVKFNWYVDGVEVHNAKTKPREEQYNSTYRVVSVLTVLHQDWLNGKEYKCKVSNKALPAPIEKTISKAKGQPREPQVYTLPPSREEMTKNQVSLTCLVKGFYPSDIAVEWESNGQPENNYKTTPPVLDSDGSFFLYSKLTVDKSRWQQGNVFSCSVMHEALHNHYTQKSLSLSPG

SEQ ID NO: 380 - protein, 340 aa, Artificial Sequence
  source: /note="Description of Artificial Sequence: Synthetic anti-hHER2-HC-G194-GDSLDMLEWSLM-T195 polypeptide"
STKGPSVFPLAPSSKSTSGGTAALGCLVKDYFPEPVTVSWNSGALTSGVHTFPAVLQSSGLYSLSSVVTVPSSSLGGDSLDMLEWSLMTQTYICNVNHKPSNTKVDKKVEPKSCDKTHTCPPCPAPELLGGPSVFLFPPKPKDTLMISRTPEVTCVVVDVSHEDPEVKFNWYVDGVEVHNAKTKPREEQYNSTYRVVSVLTVLHQDWLNGKEYKCKVSNKALPAPIEKTISKAKGQPREPQVYTLPPSREEMTKNQVSLTCLVKGFYPSDIAVEWESNGQPENNYKTTPPVLDSDGSFFLYSKLTVDKSRWQQGNVFSCSVMHEALHNHYTQKSLSLSPG

SEQ ID NO: 381 - protein, 340 aa, Artificial Sequence
  source: /note="Description of Artificial Sequence: Synthetic anti-hHER2-HC-T195-GDSLDMLEWSLM-Q196 polypeptide"
STKGPSVFPLAPSSKSTSGGTAALGCLVKDYFPEPVTVSWNSGALTSGVHTFPAVLQSSGLYSLSSVVTVPSSSLGTGDSLDMLEWSLMQTYICNVNHKPSNTKVDKKVEPKSCDKTHTCPPCPAPELLGGPSVFLFPPKPKDTLMISRTPEVTCVVVDVSHEDPEVKFNWYVDGVEVHNAKTKPREEQYNSTYRVVSVLTVLHQDWLNGKEYKCKVSNKALPAPIEKTISKAKGQPREPQVYTLPPSREEMTKNQVSLTCLVKGFYPSDIAVEWESNGQPENNYKTTPPVLDSDGSFFLYSKLTVDKSRWQQGNVFSCSVMHEALHNHYTQKSLSLSPG

SEQ ID NO: 382 - protein, 340 aa, Artificial Sequence
  source: /note="Description of Artificial Sequence: Synthetic anti-hHER2-HC-Q196-GDSLDMLEWSLM-T197 polypeptide"
STKGPSVFPLAPSSKSTSGGTAALGCLVKDYFPEPVTVSWNSGALTSGVHTFPAVLQSSGLYSLSSVVTVPSSSLGTQGDSLDMLEWSLMTYICNVNHKPSNTKVDKKVEPKSCDKTHTCPPCPAPELLGGPSVFLFPPKPKDTLMISRTPEVTCVVVDVSHEDPEVKFNWYVDGVEVHNAKTKPREEQYNSTYRVVSVLTVLHQDWLNGKEYKCKVSNKALPAPIEKTISKAKGQPREPQVYTLPPSREEMTKNQVSLTCLVKGFYPSDIAVEWESNGQPENNYKTTPPVLDSDGSFFLYSKLTVDKSRWQQGNVFSCSVMHEALHNHYTQKSLSLSPG

SEQ ID NO: 383 - protein, 118 aa, Artificial Sequence
  source: /note="Description of Artificial Sequence: Synthetic anti-hHER2-LC-T109-GDSLDMLEWSLM-V110 polypeptide"
TGDSLDMLEWSLMVAAPSVFIFPPSDEQLKSGTASVVCLLNNFYPREAKVQWKVDNALQSGNSQESVTEQDSKDSTYSLSSTLTLSKADYEKHKVYACEVTHQGLSSPVTKSFNRGEC

SEQ ID NO: 384 - protein, 118 aa, Artificial Sequence
  source: /note="Description of Artificial Sequence: Synthetic anti-hHER2-LC-V110-GDSLDMLEWSLM-A111 polypeptide"
TVGDSLDMLEWSLMAAPSVFIFPPSDEQLKSGTASVVCLLNNFYPREAKVQWKVDNALQSGNSQESVTEQDSKDSTYSLSSTLTLSKADYEKHKVYACEVTHQGLSSPVTKSFNRGEC

SEQ ID NO: 385 - protein, 118 aa, Artificial Sequence
  source: /note="Description of Artificial Sequence: Synthetic anti-hHER2-LC-A111-GDSLDMLEWSLM-A112 polypeptide"
TVAGDSLDMLEWSLMAPSVFIFPPSDEQLKSGTASVVCLLNNFYPREAKVQWKVDNALQSGNSQESVTEQDSKDSTYSLSSTLTLSKADYEKHKVYACEVTHQGLSSPVTKSFNRGEC

SEQ ID NO: 386 - protein, 340 aa, Artificial Sequence
  source: /note="Description of Artificial Sequence: Synthetic anti-hHER2-HC-P445-GDSLDMLEWSLM-G446 polypeptide"
STKGPSVFPLAPSSKSTSGGTAALGCLVKDYFPEPVTVSWNSGALTSGVHTFPAVLQSSGLYSLSSVVTVPSSSLGTQTYICNVNHKPSNTKVDKKVEPKSCDKTHTCPPCPAPELLGGPSVFLFPPKPKDTLMISRTPEVTCVVVDVSHEDPEVKFNWYVDGVEVHNAKTKPREEQYNSTYRVVSVLTVLHQDWLNGKEYKCKVSNKALPAPIEKTISKAKGQPREPQVYTLPPSREEMTKNQVSLTCLVKGFYPSDIAVEWESNGQPENNYKTTPPVLDSDGSFFLYSKLTVDKSRWQQGNVFSCSVMHEALHNHYTQKSLSLSPGDSLDMLEWSLMG

SEQ ID NO: 387 - protein, 340 aa, Artificial Sequence
  source: /note="Description of Artificial Sequence: Synthetic anti-hHER2-HC-G446-GDSLDMLEWSLM-K447 polypeptide"
STKGPSVFPLAPSSKSTSGGTAALGCLVKDYFPEPVTVSWNSGALTSGVHTFPAVLQSSGLYSLSSVVTVPSSSLGTQTYICNVNHKPSNTKVDKKVEPKSCDKTHTCPPCPAPELLGGPSVFLFPPKPKDTLMISRTPEVTCVVVDVSHEDPEVKFNWYVDGVEVHNAKTKPREEQYNSTYRVVSVLTVLHQDWLNGKEYKCKVSNKALPAPIEKTISKAKGQPREPQVYTLPPSREEMTKNQVSLTCLVKGFYPSDIAVEWESNGQPENNYKTTPPVLDSDGSFFLYSKLTVDKSRWQQGNVFSCSVMHEALHNHYTQKSLSLSPGGDSLDMLEWSLM

SEQ ID NO: 388 - protein, 226 aa, Artificial Sequence
  source: /note="Description of Artificial Sequence: Synthetic anti-hHER2-LC-I2-GDSLDMLEWSLM-Q3 polypeptide"
DIGDSLDMLEWSLMQMTQSPSSLSASVGDRVTITCRASQDVNTAVAWYQQKPGKAPKLLIYSASFLYSGVPSRFSGSRSGTDFTLTISSLQPEDFATYYCQQHYTTPPTFGQGTKVEIKRTVAAPSVFIFPPSDEQLKSGTASVVCLLNNFYPREAKVQWKVDNALQSGNSQESVTEQDSKDSTYSLSSTLTLSKADYEKHKVYACEVTHQGLSSPVTKSFNRGEC

SEQ ID NO: 389 - DNA, 48 bp, Artificial Sequence
  source: /note="Description of Artificial Sequence: Synthetic primer"
ctgagctggctgctgagactgctgaacacctccggcgtgcacaccttc

SEQ ID NO: 390 - DNA, 47 bp, Artificial Sequence
  source: /note="Description of Artificial Sequence: Synthetic primer"
tctcagcagccagctcaggctgtcgcccagggctccgctgttccagg

SEQ ID NO: 391 - DNA, 47 bp, Artificial Sequence
  source: /note="Description of Artificial Sequence: Synthetic primer"
ctgagctggctgctgagactgctgaactccggcgtgcacaccttccc

SEQ ID NO: 392 - DNA, 47 bp, Artificial Sequence
  source: /note="Description of Artificial Sequence: Synthetic primer"
tctcagcagccagctcaggctgtcgccggtcagggctccgctgttcc

SEQ ID NO: 393 - DNA, 46 bp, Artificial Sequence
  source: /note="Description of Artificial Sequence: Synthetic primer"
ctgagctggctgctgagactgctgaacggcgtgcacaccttccccg

SEQ ID NO: 394 - DNA, 46 bp, Artificial Sequence
  source: /note="Description of Artificial Sequence: Synthetic primer"
tctcagcagccagctcaggctgtcgccggaggtcagggctccgctg

SEQ ID NO: 395 - DNA, 46 bp, Artificial Sequence
  source: /note="Description of Artificial Sequence: Synthetic primer"
ctgagctggctgctgagactgctgaacgccgtgctgcagagcagcg

SEQ ID NO: 396 - DNA, 46 bp, Artificial Sequence
  source: /note="Description of Artificial Sequence: Synthetic primer"
tctcagcagccagctcaggctgtcgccggggaaggtgtgcacgccg

SEQ ID NO: 397 - DNA, 48 bp, Artificial Sequence
  source: /note="Description of Artificial Sequence: Synthetic primer"
ctgagctggctgctgagactgctgaacagcggcctgtacagcctgtcc

SEQ ID NO: 398 - DNA, 45 bp, Artificial Sequence
  source: /note="Description of Artificial Sequence: Synthetic primer"
tctcagcagccagctcaggctgtcgccgctctgcagcacggcggg

SEQ ID NO: 399 - DNA, 48 bp, Artificial Sequence
  source: /note="Description of Artificial Sequence: Synthetic primer"
ctgagctggctgctgagactgctgaacggcctgtacagcctgtccagc

SEQ ID NO: 400 - DNA, 46 bp, Artificial Sequence
  source: /note="Description of Artificial Sequence: Synthetic primer"
tctcagcagccagctcaggctgtcgccgctgctctgcagcacggcg

SEQ ID NO: 401 - DNA, 46 bp, Artificial Sequence
  source: /note="Description of Artificial Sequence: Synthetic primer"
ctgagctggctgctgagactgctgaacagcagcagcctgggcaccc

SEQ ID NO: 402 - DNA, 47 bp, Artificial Sequence
  source: /note="Description of Artificial Sequence: Synthetic primer"
tctcagcagccagctcaggctgtcgccgggcactgtcaccacgctgg

SEQ ID NO: 403 - DNA, 47 bp, Artificial Sequence
  source: /note="Description of Artificial Sequence: Synthetic primer"
ctgagctggctgctgagactgctgaacagcagcctgggcacccagac

SEQ ID NO: 404 - DNA, 47 bp, Artificial Sequence
  source: /note="Description of Artificial Sequence: Synthetic primer"
tctcagcagccagctcaggctgtcgccgctgggcactgtcaccacgc

SEQ ID NO: 405 - DNA, 48 bp, Artificial Sequence
  source: /note="Description of Artificial Sequence: Synthetic primer"
ctgagctggctgctgagactgctgaacagcctgggcacccagacctac

SEQ ID NO: 406 - DNA, 48 bp, Artificial Sequence
  source: /note="Description of Artificial Sequence: Synthetic primer"
tctcagcagccagctcaggctgtcgccgctgctgggcactgtcaccac

SEQ ID NO: 407 - DNA, 48 bp, Artificial Sequence
  source: /note="Description of Artificial Sequence: Synthetic primer"
ctgagctggctgctgagactgctgaacctgggcacccagacctacatc

SEQ ID NO: 408 - DNA, 48 bp, Artificial Sequence
  source: /note="Description of Artificial Sequence: Synthetic primer"
tctcagcagccagctcaggctgtcgccgctgctgctgggcactgtcac

SEQ ID NO: 409 - DNA, 48 bp, Artificial Sequence
  source: /note="Description of Artificial Sequence: Synthetic primer"
ctgagctggctgctgagactgctgaacggcacccagacctacatctgc

SEQ ID NO: 410 - DNA, 47 bp, Artificial Sequence
  source: /note="Description of Artificial Sequence: Synthetic primer"
tctcagcagccagctcaggctgtcgcccaggctgctgctgggcactg

SEQ ID NO: 411 - DNA, 51 bp, Artificial Sequence
  source: /note="Description of Artificial Sequence: Synthetic primer"
ctgagctggctgctgagactgctgaacacccagacctacatctgcaacgtg

SEQ ID NO: 412 - DNA, 45 bp, Artificial Sequence
  source: /note="Description of Artificial Sequence: Synthetic primer"
tctcagcagccagctcaggctgtcgccgcccaggctgctgctggg

SEQ ID NO: 413 - DNA, 51 bp, Artificial Sequence
  source: /note="Description of Artificial Sequence: Synthetic primer"
ctgagctggctgctgagactgctgaaccagacctacatctgcaacgtgaac

SEQ ID NO: 414 - DNA, 46 bp, Artificial Sequence
  source: /note="Description of Artificial Sequence: Synthetic primer"
tctcagcagccagctcaggctgtcgccggtgcccaggctgctgctg

SEQ ID NO: 415 - DNA, 51 bp, Artificial Sequence
  source: /note="Description of Artificial Sequence: Synthetic primer"
ctgagctggctgctgagactgctgaacacctacatctgcaacgtgaaccac

SEQ ID NO: 416 - DNA, 46 bp, Artificial Sequence
  source: /note="Description of Artificial Sequence: Synthetic primer"
tctcagcagccagctcaggctgtcgccctgggtgcccaggctgctg

SEQ ID NO: 417 - DNA, 48 bp, Artificial Sequence
  source: /note="Description of Artificial Sequence: Synthetic primer"
ctgagctggctgctgagactgctgaaccccagcaacaccaaggtggac

SEQ ID NO: 418 - DNA, 53 bp, Artificial Sequence
  source: /note="Description of Artificial Sequence: Synthetic primer"
tctcagcagccagctcaggctgtcgcccttgtggttcacgttgcagatgtagg

SEQ ID NO: 419 - DNA, 52 bp, Artificial Sequence
  source: /note="Description of Artificial Sequence: Synthetic primer"
ctgagctggctgctgagactgctgaacagcaacaccaaggtggacaagaaag

SEQ ID NO: 420 - DNA, 49 bp, Artificial Sequence
  source: /note="Description of Artificial Sequence: Synthetic primer"
tctcagcagccagctcaggctgtcgccgggcttgtggttcacgttgcag

SEQ ID NO: 421 - DNA, 52 bp, Artificial Sequence
  source: /note="Description of Artificial Sequence: Synthetic primer"
ctgagctggctgctgagactgctgaacaacaccaaggtggacaagaaagtgg

SEQ ID NO: 422 - DNA, 49 bp, Artificial Sequence
  source: /note="Description of Artificial Sequence: Synthetic primer"
tctcagcagccagctcaggctgtcgccgctgggcttgtggttcacgttg

SEQ ID NO: 423 - DNA, 45 bp, Artificial Sequence
  source: /note="Description of Artificial Sequence: Synthetic primer"
ctgagctggctgctgagactgctgaacgccccagagctgctgggc

SEQ ID NO: 424 - DNA, 46 bp, Artificial Sequence
  source: /note="Description of Artificial Sequence: Synthetic primer"
tctcagcagccagctcaggctgtcgcctgggcagggggggcaggtg

SEQ ID NO: 425 - DNA, 46 bp, Artificial Sequence
  source: /note="Description of Artificial Sequence: Synthetic primer"
ctgagctggctgctgagactgctgaacccagagctgctgggcggac

SEQ ID NO: 426 - DNA, 44 bp, Artificial Sequence
  source: /note="Description of Artificial Sequence: Synthetic primer"
tctcagcagccagctcaggctgtcgccggctgggcagggggggc

SEQ ID NO: 427 - DNA, 45 bp, Artificial Sequence
  source: /note="Description of Artificial Sequence: Synthetic primer"
ctgagctggctgctgagactgctgaacgagctgctgggcggaccc

SEQ ID NO: 428 - DNA, 45 bp, Artificial Sequence
  source: /note="Description of Artificial Sequence: Synthetic primer"
tctcagcagccagctcaggctgtcgcctggggctgggcagggggg

SEQ ID NO: 429 - DNA, 45 bp, Artificial Sequence
  source: /note="Description of Artificial Sequence: Synthetic primer"
ctgagctggctgctgagactgctgaacctgctgggcggaccctcc

SEQ ID NO: 430 - DNA, 45 bp, Artificial Sequence
  source: /note="Description of Artificial Sequence: Synthetic primer"
tctcagcagccagctcaggctgtcgccctctggggctgggcaggg

SEQ ID NO: 431 - DNA, 45 bp, Artificial Sequence
  source: /note="Description of Artificial Sequence: Synthetic primer"
ctgagctggctgctgagactgctgaacctgggcggaccctccgtg

SEQ ID NO: 432 - DNA, 46 bp, Artificial Sequence
  source: /note="Description of Artificial Sequence: Synthetic primer"
tctcagcagccagctcaggctgtcgcccagctctggggctgggcag

SEQ ID NO: 433 - DNA, 46 bp, Artificial Sequence
  source: /note="Description of Artificial Sequence: Synthetic primer"
ctgagctggctgctgagactgctgaacggcggaccctccgtgttcc

SEQ ID NO: 434 - DNA, 46 bp, Artificial Sequence
  source: /note="Description of Artificial Sequence: Synthetic primer"
tctcagcagccagctcaggctgtcgcccagcagctctggggctggg

SEQ ID NO: 435 - DNA, 49 bp, Artificial Sequence
  source: /note="Description of Artificial Sequence: Synthetic primer"
ctgagctggctgctgagactgctgaacggaccctccgtgttcctgttcc

SEQ ID NO: 436 - DNA, 45 bp, Artificial Sequence
  source: /note="Description of Artificial Sequence: Synthetic primer"
tctcagcagccagctcaggctgtcgccgcccagcagctctggggc

SEQ ID NO: 437 - DNA, 48 bp, Artificial Sequence
  source: /note="Description of Artificial Sequence: Synthetic primer"
ctgagctggctgctgagactgctgaaccccaagcccaaggacaccctg

SEQ ID NO: 438 - DNA, 48 bp, Artificial Sequence
  source: /note="Description of Artificial Sequence: Synthetic primer"
tctcagcagccagctcaggctgtcgccggggaacaggaacacggaggg

SEQ ID NO: 439 - DNA, 51 bp, Artificial Sequence
  source: /note="Description of Artificial Sequence: Synthetic primer"
ctgagctggctgctgagactgctgaacaagcccaaggacaccctgatgatc

SEQ ID NO: 440 - DNA, 47 bp, Artificial Sequence
  source: /note="Description of Artificial Sequence: Synthetic primer"
tctcagcagccagctcaggctgtcgccgggggggaacaggaacacgg

SEQ ID NO: 441 - DNA, 47 bp, Artificial Sequence
  source: /note="Description of Artificial Sequence: Synthetic primer"
ctgagctggctgctgagactgctgaacagcaggacccccgaggtgac

SEQ ID NO: 442 - DNA, 49 bp, Artificial Sequence
  source: /note="Description of Artificial Sequence: Synthetic primer"
tctcagcagccagctcaggctgtcgccgatcatcagggtgtccttgggc

SEQ ID NO: 443 - DNA, 47 bp, Artificial Sequence
  source: /note="Description of Artificial Sequence: Synthetic primer"
ctgagctggctgctgagactgctgaacaggacccccgaggtgacctg

SEQ ID NO: 444 - DNA, 50 bp, Artificial Sequence
  source: /note="Description of Artificial Sequence: Synthetic primer"
tctcagcagccagctcaggctgtcgccgctgatcatcagggtgtccttgg

SEQ ID NO: 445 - DNA, 46 bp, Artificial Sequence
  source: /note="Description of Artificial Sequence: Synthetic primer"
ctgagctggctgctgagactgctgaacacccccgaggtgacctgcg

SEQ ID NO: 446 - DNA, 49 bp, Artificial Sequence
  source: /note="Description of Artificial Sequence: Synthetic primer"
tctcagcagccagctcaggctgtcgcccctgctgatcatcagggtgtcc

SEQ ID NO: 447 - DNA, 46 bp, Artificial Sequence
  source: /note="Description of Artificial Sequence: Synthetic primer"
ctgagctggctgctgagactgctgaaccccgaggtgacctgcgtgg

SEQ ID NO: 448 - DNA, 49 bp, Artificial Sequence
  source: /note="Description of Artificial Sequence: Synthetic primer"
tctcagcagccagctcaggctgtcgccggtcctgctgatcatcagggtg

SEQ ID NO: 449 - DNA, 48 bp, Artificial Sequence
  source: /note="Description of Artificial Sequence: Synthetic primer"
ctgagctggctgctgagactgctgaacgaggtgacctgcgtggtggtg

SEQ ID NO: 450 - DNA, 48 bp, Artificial Sequence
  source: /note="Description of Artificial Sequence: Synthetic primer"
tctcagcagccagctcaggctgtcgccgggggtcctgctgatcatcag

SEQ ID NO: 451 - DNA, 51 bp, Artificial Sequence
  source: /note="Description of Artificial Sequence: Synthetic primer"
ctgagctggctgctgagactgctgaaccacgaggacccagaggtgaagttc

SEQ ID NO: 452 - DNA, 47 bp, Artificial Sequence
  source: /note="Description of Artificial Sequence: Synthetic primer"
tctcagcagccagctcaggctgtcgccgctcacgtccaccaccacgc

SEQ ID NO: 453 - DNA, 51 bp, Artificial Sequence
  source: /note="Description of Artificial Sequence: Synthetic primer"
ctgagctggctgctgagactgctgaacgaggacccagaggtgaagttcaac

SEQ ID NO: 454 - DNA, 48 bp, Artificial Sequence
  source: /note="Description of Artificial Sequence: Synthetic primer"
tctcagcagccagctcaggctgtcgccgtggctcacgtccaccaccac

SEQ ID NO: 455 - DNA, 51 bp, Artificial Sequence
  source: /note="Description of Artificial Sequence: Synthetic primer"
ctgagctggctgctgagactgctgaacgacccagaggtgaagttcaactgg

SEQ ID NO: 456 - DNA, 48 bp, Artificial Sequence
  source: /note="Description of Artificial Sequence: Synthetic primer"
tctcagcagccagctcaggctgtcgccctcgtggctcacgtccaccac

SEQ ID NO: 457 - DNA, 51 bp, Artificial Sequence
  source: /note="Description of Artificial Sequence: Synthetic primer"
ctgagctggctgctgagactgctgaacccagaggtgaagttcaactggtac

SEQ ID NO: 458 - DNA, 48 bp, Artificial Sequence
  source: /note="Description of Artificial Sequence: Synthetic primer"
tctcagcagccagctcaggctgtcgccgtcctcgtggctcacgtccac

SEQ ID NO: 459 - DNA, 52 bp, Artificial Sequence
  source: /note="Description of Artificial Sequence: Synthetic primer"
ctgagctggctgctgagactgctgaacgaggtgaagttcaactggtacgtgg

SEQ ID NO: 460 - DNA, 48 bp, Artificial Sequence
  source: /note="Description of Artificial Sequence: Synthetic primer"
tctcagcagccagctcaggctgtcgcctgggtcctcgtggctcacgtc

SEQ ID NO: 461 - DNA, 47 bp, Artificial Sequence
  source: /note="Description of Artificial Sequence: Synthetic primer"
ctgagctggctgctgagactgctgaacggcgtggaggtgcacaacgc

SEQ ID NO: 462 - DNA, 52 bp, Artificial Sequence
  source: /note="Description of Artificial Sequence: Synthetic primer"
tctcagcagccagctcaggctgtcgccgtccacgtaccagttgaacttcacc

SEQ ID NO: 463 - DNA, 49 bp, Artificial Sequence
  source: /note="Description of Artificial Sequence: Synthetic primer"
ctgagctggctgctgagactgctgaacaacgccaagaccaagcccagag

SEQ ID NO: 464 - DNA, 46 bp, Artificial Sequence
  source: /note="Description of Artificial Sequence: Synthetic primer"
tctcagcagccagctcaggctgtcgccgtgcacctccacgccgtcc

SEQ ID NO: 465 - DNA, 48 bp, Artificial Sequence
  source: /note="Description of Artificial Sequence: Synthetic primer"
ctgagctggctgctgagactgctgaacgccaagaccaagcccagagag

SEQ ID NO: 466 - DNA, 48 bp, Artificial Sequence
  source: /note="Description of Artificial Sequence: Synthetic primer"
tctcagcagccagctcaggctgtcgccgttgtgcacctccacgccgtc

SEQ ID NO: 467 - DNA, 51 bp, Artificial Sequence
  source: /note="Description of Artificial Sequence: Synthetic primer"
ctgagctggctgctgagactgctgaacagagaggagcagtacaacagcacc

SEQ ID NO: 468 - DNA, 48 bp, Artificial Sequence
  source: /note="Description of Artificial Sequence: Synthetic primer"
tctcagcagccagctcaggctgtcgccgggcttggtcttggcgttgtg

SEQ ID NO: 469 - DNA, 48 bp, Artificial Sequence
  source: /note="Description of Artificial Sequence: Synthetic primer"
ctgagctggctgctgagactgctgaacgtgctgcaccaggactggctg

SEQ ID NO: 470 - DNA, 47 bp, Artificial Sequence
  source: /note="Description of Artificial Sequence: Synthetic primer"
tctcagcagccagctcaggctgtcgccggtcagcacggacaccaccc

SEQ ID NO: 471 - DNA, 48 bp, Artificial Sequence
  source: /note="Description of Artificial Sequence: Synthetic primer"
ctgagctggctgctgagactgctgaacctgcaccaggactggctgaac

SEQ ID NO: 472 - DNA, 48 bp, Artificial Sequence
  source: /note="Description of Artificial Sequence: Synthetic primer"
tctcagcagccagctcaggctgtcgcccacggtcagcacggacaccac

SEQ ID NO: 473 - DNA, 48 bp, Artificial Sequence
  source: /note="Description of Artificial Sequence: Synthetic primer"
ctgagctggctgctgagactgctgaaccaccaggactggctgaacggc

SEQ ID NO: 474 - DNA, 48 bp, Artificial Sequence
  source: /note="Description of Artificial Sequence: Synthetic primer"
tctcagcagccagctcaggctgtcgcccagcacggtcagcacggacac

SEQ ID NO: 475 - DNA, 48 bp, Artificial Sequence
  source: /note="Description of Artificial Sequence: Synthetic primer"
ctgagctggctgctgagactgctgaaccaggactggctgaacggcaag

SEQ ID NO: 476 - DNA, 47 bp, Artificial Sequence
  source: /note="Description of Artificial Sequence: Synthetic primer"
tctcagcagccagctcaggctgtcgccgtgcagcacggtcagcacgg

SEQ ID NO: 477 - DNA, 51 bp, Artificial Sequence
  source: /note="Description of Artificial Sequence: Synthetic primer"
ctgagctggctgctgagactgctgaacggcaaggaatacaagtgcaaggtc

SEQ ID NO: 478 - DNA, 48 bp, Artificial Sequence
  source: /note="Description of Artificial Sequence: Synthetic primer"
tctcagcagccagctcaggctgtcgccgttcagccagtcctggtgcag

SEQ ID NO: 479 - DNA, 54 bp, Artificial Sequence
  source: /note="Description of Artificial Sequence: Synthetic primer"
ctgagctggctgctgagactgctgaacaaggaatacaagtgcaaggtctccaac

SEQ ID NO: 480 - DNA, 48 bp, Artificial Sequence
  source: /note="Description of Artificial Sequence: Synthetic primer"
tctcagcagccagctcaggctgtcgccgccgttcagccagtcctggtg

SEQ ID NO: 481 - DNA, 54 bp, Artificial Sequence
  source: /note="Description of Artificial Sequence: Synthetic primer"
ctgagctggctgctgagactgctgaacgaatacaagtgcaaggtctccaacaag

SEQ ID NO: 482 - DNA, 48 bp, Artificial Sequence
  source: /note="Description of Artificial Sequence: Synthetic primer"
tctcagcagccagctcaggctgtcgcccttgccgttcagccagtcctg

SEQ ID NO: 483 - DNA, 45 bp, Artificial Sequence
  source: /note="Description of Artificial Sequence: Synthetic primer"
ctgagctggctgctgagactgctgaacgccctgccagcccccatc

SEQ ID NO: 484 - DNA, 54 bp, Artificial Sequence
  source: /note="Description of Artificial Sequence: Synthetic primer"
tctcagcagccagctcaggctgtcgcccttgttggagaccttgcacttgtattc

SEQ ID NO: 485 - DNA, 48 bp, Artificial Sequence
  source: /note="Description of Artificial Sequence: Synthetic primer"
ctgagctggctgctgagactgctgaacctgccagcccccatcgaaaag

SEQ ID NO: 486 - DNA, 49 bp, Artificial Sequence
  source: /note="Description of Artificial Sequence: Synthetic primer"
tctcagcagccagctcaggctgtcgccggccttgttggagaccttgcac

SEQ ID NO: 487 - DNA, 48 bp, Artificial Sequence
  source: /note="Description of Artificial Sequence: Synthetic primer"
ctgagctggctgctgagactgctgaacccagcccccatcgaaaagacc

SEQ ID NO: 488 - DNA, 49 bp, Artificial Sequence
  source: /note="Description of Artificial Sequence: Synthetic primer"
tctcagcagccagctcaggctgtcgcccagggccttgttggagaccttg

SEQ ID NO: 489 - DNA, 50 bp, Artificial Sequence
  source: /note="Description of Artificial Sequence: Synthetic primer"
ctgagctggctgctgagactgctgaacgcccccatcgaaaagaccatcag

SEQ ID NO: 490 - DNA, 48 bp, Artificial Sequence
  source: /note="Description of Artificial Sequence: Synthetic primer"
tctcagcagccagctcaggctgtcgcctggcagggccttgttggagac

SEQ ID NO: 491 - DNA, 51 bp, Artificial Sequence
  source: /note="Description of Artificial Sequence: Synthetic primer"
ctgagctggctgctgagactgctgaaccccatcgaaaagaccatcagcaag

SEQ ID NO: 492 - DNA, 47 bp, Artificial Sequence
  source: /note="Description of Artificial Sequence: Synthetic primer"
tctcagcagccagctcaggctgtcgccggctggcagggccttgttgg

SEQ ID NO: 493 - DNA, 46 bp, Artificial Sequence
  source: /note="Description of Artificial Sequence: Synthetic primer"
ctgagctggctgctgagactgctgaacaagggccagccacgggagc

SEQ ID NO: 494 - DNA, 52 bp, Artificial Sequence
  source: /note="Description of Artificial Sequence: Synthetic primer"
tctcagcagccagctcaggctgtcgccggccttgctgatggtcttttcgatg

SEQ ID NO: 495 - DNA, 45 bp, Artificial Sequence
  source: /note="Description of Artificial Sequence: Synthetic primer"
ctgagctggctgctgagactgctgaacggccagccacgggagccc

SEQ ID NO: 496 - DNA, 51 bp, Artificial Sequence
  source: /note="Description of Artificial Sequence: Synthetic primer"
tctcagcagccagctcaggctgtcgcccttggccttgctgatggtcttttc

SEQ ID NO: 497 - DNA, 45 bp, Artificial Sequence
  source: /note="Description of Artificial Sequence: Synthetic primer"
ctgagctggctgctgagactgctgaaccagccacgggagccccag

SEQ ID NO: 498 - DNA, 49 bp, Artificial Sequence
  source: /note="Description of Artificial Sequence: Synthetic primer"
tctcagcagccagctcaggctgtcgccgcccttggccttgctgatggtc

SEQ ID NO: 499 - DNA, 45 bp, Artificial Sequence
  source: /note="Description of Artificial Sequence: Synthetic primer"
ctgagctggctgctgagactgctgaacccacgggagccccaggtg

SEQ ID NO: 500 - DNA, 49 bp, Artificial Sequence
  source: /note="Description of Artificial Sequence: Synthetic primer"
tctcagcagccagctcaggctgtcgccctggcccttggccttgctgatg

SEQ ID NO: 501 - DNA, 47 bp, Artificial Sequence
  source: /note="Description of Artificial Sequence: Synthetic primer"
ctgagctggctgctgagactgctgaaccgggagccccaggtgtacac

SEQ ID NO: 502 - DNA, 47 bp, Artificial Sequence
  source: /note="Description of Artificial Sequence: Synthetic primer"
tctcagcagccagctcaggctgtcgcctggctggcccttggccttgc

SEQ ID NO: 503 - DNA, 48 bp, Artificial Sequence
  source: /note="Description of Artificial Sequence: Synthetic primer"
ctgagctggctgctgagactgctgaacgagccccaggtgtacaccctg

SEQ ID NO: 504 - DNA, 45 bp, Artificial Sequence
  source: /note="Description of Artificial Sequence: Synthetic primer"
tctcagcagccagctcaggctgtcgccccgtggctggcccttggc

SEQ ID NO: 505 - DNA, 51 bp, Artificial Sequence
  source: /note="Description of Artificial Sequence: Synthetic primer"
ctgagctggctgctgagactgctgaacgaggagatgaccaagaaccaggtg

SEQ ID NO: 506 - DNA, 44 bp, Artificial Sequence
  source: /note="Description of Artificial Sequence: Synthetic primer"
tctcagcagccagctcaggctgtcgccccgggaggggggcaggg

SEQ ID NO: 507 - DNA, 51 bp, Artificial Sequence
  source: /note="Description of Artificial Sequence: Synthetic primer"
ctgagctggctgctgagactgctgaacgagatgaccaagaaccaggtgtcc

SEQ ID NO: 508 - DNA, 45 bp, Artificial Sequence
  source: /note="Description of Artificial Sequence: Synthetic primer"
tctcagcagccagctcaggctgtcgccctcccgggaggggggcag

SEQ ID NO: 509 - DNA, 51 bp, Artificial Sequence
  source: /note="Description of Artificial Sequence: Synthetic primer"
ctgagctggctgctgagactgctgaacatgaccaagaaccaggtgtccctg

SEQ ID NO: 510 - DNA, 45 bp, Artificial Sequence
  source: /note="Description of Artificial Sequence: Synthetic primer"
tctcagcagccagctcaggctgtcgccctcctcccgggagggggg

SEQ ID NO: 511 - DNA, 50 bp, Artificial Sequence
  source: /note="Description of Artificial Sequence: Synthetic primer"
ctgagctggctgctgagactgctgaacaccaagaaccaggtgtccctgac

SEQ ID NO: 512 - DNA, 46 bp, Artificial Sequence
  source: /note="Description of Artificial Sequence: Synthetic primer"
tctcagcagccagctcaggctgtcgcccatctcctcccgggagggg

SEQ ID NO: 513 - DNA, 50 bp, Artificial Sequence
  source: /note="Description of Artificial Sequence: Synthetic primer"
ctgagctggctgctgagactgctgaacaagaaccaggtgtccctgacctg

SEQ ID NO: 514 - DNA, 47 bp, Artificial Sequence
  source: /note="Description of Artificial Sequence: Synthetic primer"
tctcagcagccagctcaggctgtcgccggtcatctcctcccgggagg

SEQ ID NO: 515 - DNA, 49 bp, Artificial Sequence
  source: /note="Description of Artificial Sequence: Synthetic primer"
ctgagctggctgctgagactgctgaacaaccaggtgtccctgacctgtc

SEQ ID NO: 516 - DNA, 49 bp, Artificial Sequence
  source: /note="Description of Artificial Sequence: Synthetic primer"
tctcagcagccagctcaggctgtcgcccttggtcatctcctcccgggag

SEQ ID NO: 517 - DNA, 48 bp, Artificial Sequence
  source: /note="Description of Artificial Sequence: Synthetic primer"
ctgagctggctgctgagactgctgaacggccagcccgagaacaactac

SEQ ID NO: 518 - DNA, 48 bp, Artificial Sequence
  source: /note="Description of Artificial Sequence: Synthetic primer"
tctcagcagccagctcaggctgtcgccgttgctctcccactccacggc

SEQ ID NO: 519 - DNA, 52 bp, Artificial Sequence
  source: /note="Description of Artificial Sequence: Synthetic primer"
ctgagctggctgctgagactgctgaacaacaactacaagaccacacctccag

SEQ ID NO: 520 - DNA, 46 bp, Artificial Sequence
  source: /note="Description of Artificial Sequence: Synthetic primer"
tctcagcagccagctcaggctgtcgccctcgggctggccgttgctc

SEQ ID NO: 521 - DNA, 52 bp, Artificial Sequence
  source: /note="Description of Artificial Sequence: Synthetic primer"
ctgagctggctgctgagactgctgaacaactacaagaccacacctccagtgc

SEQ ID NO: 522 - DNA, 47 bp, Artificial Sequence
  source: /note="Description of Artificial Sequence: Synthetic primer"
tctcagcagccagctcaggctgtcgccgttctcgggctggccgttgc

SEQ ID NO: 523 - DNA, 48 bp, Artificial Sequence
  source: /note="Description of Artificial Sequence: Synthetic primer"
ctgagctggctgctgagactgctgaaccctccagtgctggacagcgac

SEQ ID NO: 524 - DNA, 52 bp, Artificial Sequence
  source: /note="Description of Artificial Sequence: Synthetic primer"
tctcagcagccagctcaggctgtcgcctgtggtcttgtagttgttctcgggc

SEQ ID NO: 525 - DNA, 47 bp, Artificial Sequence
  source: /note="Description of Artificial Sequence: Synthetic primer"
ctgagctggctgctgagactgctgaacccagtgctggacagcgacgg

SEQ ID NO: 526 - DNA, 52 bp, Artificial Sequence
  source: /note="Description of Artificial Sequence: Synthetic primer"
tctcagcagccagctcaggctgtcgccaggtgtggtcttgtagttgttctcg

SEQ ID NO: 527 - DNA, 48 bp, Artificial Sequence
  source: /note="Description of Artificial Sequence: Synthetic primer"
ctgagctggctgctgagactgctgaacagcgacggcagcttcttcctg

SEQ ID NO: 528 - DNA, 49 bp, Artificial Sequence
  source: /note="Description of Artificial Sequence: Synthetic primer"
tctcagcagccagctcaggctgtcgccgtccagcactggaggtgtggtc

SEQ ID NO: 529 - DNA, 50 bp, Artificial Sequence
  source: /note="Description of Artificial Sequence: Synthetic primer"
ctgagctggctgctgagactgctgaacgacggcagcttcttcctgtacag

SEQ ID NO: 530 - DNA, 49 bp, Artificial Sequence
  source: /note="Description of Artificial Sequence: Synthetic primer"
tctcagcagccagctcaggctgtcgccgctgtccagcactggaggtgtg

SEQ ID NO: 531 - DNA, 51 bp, Artificial Sequence
  source: /note="Description of Artificial Sequence: Synthetic primer"
ctgagctggctgctgagactgctgaacggcagcttcttcctgtacagcaag

SEQ ID NO: 532 - DNA, 48 bp, Artificial Sequence
  source: /note="Description of Artificial Sequence: Synthetic primer"
tctcagcagccagctcaggctgtcgccgtcgctgtccagcactggagg

SEQ ID NO: 533 - DNA, 48 bp, Artificial Sequence
  source: /note="Description of Artificial Sequence: Synthetic primer"
ctgagctggctgctgagactgctgaacaggtggcagcagggcaacgtg

SEQ ID NO: 534 - DNA, 49 bp, Artificial Sequence
  source: /note="Description of Artificial Sequence: Synthetic primer"
tctcagcagccagctcaggctgtcgccggacttgtccacggtcagcttg

SEQ ID NO: 535 - DNA, 48 bp, Artificial Sequence
  source: /note="Description of Artificial Sequence: Synthetic primer"
ctgagctggctgctgagactgctgaactggcagcagggcaacgtgttc

SEQ ID NO: 536 - DNA, 48 bp, Artificial Sequence
  source: /note="Description of Artificial Sequence: Synthetic primer"
tctcagcagccagctcaggctgtcgcccctggacttgtccacggtcag

SEQ ID NO: 537 - DNA, 48 bp, Artificial Sequence
  source: /note="Description of Artificial Sequence: Synthetic primer"
ctgagctggctgctgagactgctgaaccagcagggcaacgtgttcagc

SEQ ID NO: 538 - DNA, 49 bp, Artificial Sequence
  source: /note="Description of Artificial Sequence: Synthetic primer"
tctcagcagccagctcaggctgtcgccccacctggacttgtccacggtc

SEQ ID NO: 539 - DNA, 48 bp, Artificial Sequence
  source: /note="Description of Artificial Sequence: Synthetic primer"
ctgagctggctgctgagactgctgaaccagggcaacgtgttcagctgc

SEQ ID NO: 540 - DNA, 48 bp, Artificial Sequence
  source: /note="Description of Artificial Sequence: Synthetic primer"
tctcagcagccagctcaggctgtcgccctgccacctggacttgtccac

SEQ ID NO: 541 - DNA, 48 bp, Artificial Sequence
  source: /note="Description of Artificial Sequence: Synthetic primer"
ctgagctggctgctgagactgctgaacggcaacgtgttcagctgcagc

SEQ ID NO: 542 - DNA, 48 bp, Artificial Sequence
  source: /note="Description of Artificial Sequence: Synthetic primer"
tctcagcagccagctcaggctgtcgccctgctgccacctggacttgtc

SEQ ID NO: 543 - DNA, 51 bp, Artificial Sequence
  source: /note="Description of Artificial Sequence: Synthetic primer"
ctgagctggctgctgagactgctgaacaacgtgttcagctgcagcgtgatg

SEQ ID NO: 544 - DNA, 46 bp, Artificial Sequence
  source: /note="Description of Artificial Sequence: Synthetic primer"
tctcagcagccagctcaggctgtcgccgccctgctgccacctggac

SEQ ID NO: 545 - DNA, 49 bp, Artificial Sequence
  source: /note="Description of Artificial Sequence: Synthetic primer"
ctgagctggctgctgagactgctgaacgtgttcagctgcagcgtgatgc

SEQ ID NO: 546 - DNA, 47 bp, Artificial Sequence
  source: /note="Description of Artificial Sequence: Synthetic primer"
tctcagcagccagctcaggctgtcgccgttgccctgctgccacctgg

SEQ ID NO: 547 - DNA, 51 bp, Artificial Sequence
  source: /note="Description of Artificial Sequence: Synthetic primer"
ctgagctggctgctgagactgctgaacaaccactacacccagaagagcctg

SEQ ID NO: 548 - DNA, 48 bp, Artificial Sequence
  source: /note="Description of Artificial Sequence: Synthetic primer"
tctcagcagccagctcaggctgtcgccgtgcagggcctcgtgcatcac

SEQ ID NO: 549 - DNA, 50 bp, Artificial Sequence
  source: /note="Description of Artificial Sequence: Synthetic primer"
ctgagctggctgctgagactgctgaaccactacacccagaagagcctgag

SEQ ID NO: 550 - DNA, 49 bp, Artificial Sequence
  source: /note="Description of Artificial Sequence: Synthetic primer"
tctcagcagccagctcaggctgtcgccgttgtgcagggcctcgtgcatc

SEQ ID NO: 551 - DNA, 50 bp, Artificial Sequence
  source: /note="Description of Artificial Sequence: Synthetic primer"
ctgagctggctgctgagactgctgaacctgtcccccggcaagtaatctag

SEQ ID NO: 552 - DNA, 49 bp, Artificial Sequence
  source: /note="Description of Artificial Sequence: Synthetic primer"
tctcagcagccagctcaggctgtcgccgctcaggctcttctgggtgtag

SEQ ID NO: 553 - DNA, 51 bp, Artificial Sequence
  source: /note="Description of Artificial Sequence: Synthetic primer"
ctgagctggctgctgagactgctgaactcccccggcaagtaatctagacac

SEQ ID NO: 554 - DNA, 49 bp, Artificial Sequence
  source: /note="Description of Artificial Sequence: Synthetic primer"
tctcagcagccagctcaggctgtcgcccaggctcaggctcttctgggtg

SEQ ID NO: 555 - DNA, 51 bp, Artificial Sequence
  source: /note="Description of Artificial Sequence: Synthetic primer"
ctgagctggctgctgagactgctgaaccccggcaagtaatctagacacctc

SEQ ID NO: 556 - DNA, 48 bp, Artificial Sequence
  source: /note="Description of Artificial Sequence: Synthetic primer"
tctcagcagccagctcaggctgtcgccggacaggctcaggctcttctg

SEQ ID NO: 557 - DNA, 52 bp, Artificial Sequence
  source: /note="Description of Artificial Sequence: Synthetic primer"
ctgagctggctgctgagactgctgaacggcaagtaatctagacacctcagac

SEQ ID NO: 558 - DNA, 46 bp, Artificial Sequence
  source: /note="Description of Artificial Sequence: Synthetic primer"
tctcagcagccagctcaggctgtcgccgggggacaggctcaggctc

SEQ ID NO: 559 - DNA, 56 bp, Artificial Sequence
  source: /note="Description of Artificial Sequence: Synthetic primer"
ctgagctggctgctgagactgctgaacaagtaatctagacacctcagacaatcaac

SEQ ID NO: 560 - DNA, 45 bp, Artificial Sequence
  source: /note="Description of Artificial Sequence: Synthetic primer"
tctcagcagccagctcaggctgtcgccgccgggggacaggctcag

SEQ ID NO: 561 - DNA, 46 bp, Artificial Sequence
  source: /note="Description of Artificial Sequence: Synthetic primer"
ctggagttcatcgccagcaagctggccagcaccaagggccccagcg

SEQ ID NO: 562 - DNA, 48 bp, Artificial Sequence
  source: /note="Description of Artificial Sequence: Synthetic primer"
cttgctggcgatgaactccaggctgtcagccgaggagacggtgaccag

SEQ ID NO: 563 - DNA, 48 bp, Artificial Sequence
  source: /note="Description of Artificial Sequence: Synthetic primer"
ctggagttcatcgccagcaagctggccaccaagggccccagcgtgttc

SEQ ID NO: 564 - DNA, 48 bp, Artificial Sequence
  source: /note="Description of Artificial Sequence: Synthetic primer"
cttgctggcgatgaactccaggctgtcgctagccgaggagacggtgac

SEQ ID NO: 565 - DNA, 47 bp, Artificial Sequence
  source: /note="Description of Artificial Sequence: Synthetic primer"
ctggagttcatcgccagcaagctggccaagggccccagcgtgttccc

SEQ ID NO: 566 - DNA, 47 bp, Artificial Sequence
  source: /note="Description of Artificial Sequence: Synthetic primer"
cttgctggcgatgaactccaggctgtcggtgctagccgaggagacgg

SEQ ID NO: 567 - DNA, 47 bp, Artificial Sequence
  source: /note="Description of Artificial Sequence: Synthetic primer"
ctggagttcatcgccagcaagctggccagcaagagcaccagcggcgg

SEQ ID NO: 568 - DNA, 46 bp, Artificial Sequence
  source: /note="Description of Artificial Sequence: Synthetic primer"
cttgctggcgatgaactccaggctgtcgctgggggccagggggaac

SEQ ID NO: 569 - DNA, 47 bp, Artificial Sequence
  source: /note="Description of Artificial Sequence: Synthetic primer"
ctggagttcatcgccagcaagctggccaagagcaccagcggcggcac

SEQ ID NO: 570 - DNA, 45 bp, Artificial Sequence
  source: /note="Description of Artificial Sequence: Synthetic primer"
cttgctggcgatgaactccaggctgtcgctgctgggggccagggg

SEQ ID NO: 571 - DNA, 46 bp, Artificial Sequence
  source: /note="Description of Artificial Sequence: Synthetic primer"
ctggagttcatcgccagcaagctggccagcaccagcggcggcacag

SEQ ID NO: 572 - DNA, 46 bp, Artificial Sequence
  source: /note="Description of Artificial Sequence: Synthetic primer"
cttgctggcgatgaactccaggctgtccttgctgctgggggccagg

SEQ ID NO: 573 - DNA, 45 bp, Artificial Sequence
  source: /note="Description of Artificial Sequence: Synthetic primer"
ctggagttcatcgccagcaagctggccaccagcggcggcacagcc

SEQ ID NO: 574 - DNA, 46 bp, Artificial Sequence
  source: /note="Description of Artificial Sequence: Synthetic primer"
cttgctggcgatgaactccaggctgtcgctcttgctgctgggggcc

SEQ ID NO: 575 - DNA, 45 bp, Artificial Sequence
  source: /note="Description of Artificial Sequence: Synthetic primer"
ctggagttcatcgccagcaagctggccagcggcggcacagccgcc

SEQ ID NO: 576 - DNA, 47 bp, Artificial Sequence
  source: /note="Description of Artificial Sequence: Synthetic primer"
cttgctggcgatgaactccaggctgtcggtgctcttgctgctggggg

SEQ ID NO: 577 - DNA, 45 bp, Artificial Sequence
  source: /note="Description of Artificial Sequence: Synthetic primer"
ctggagttcatcgccagcaagctggccggcggcacagccgccctg

SEQ ID NO: 578 - DNA, 48 bp, Artificial Sequence
  source: /note="Description of Artificial Sequence: Synthetic primer"
cttgctggcgatgaactccaggctgtcgctggtgctcttgctgctggg

SEQ ID NO: 579 - DNA, 45 bp, Artificial Sequence
  source: /note="Description of Artificial Sequence: Synthetic primer"
ctggagttcatcgccagcaagctggccggcacagccgccctgggc

SEQ ID NO: 580 - DNA, 47 bp, Artificial Sequence
  source: /note="Description of Artificial Sequence: Synthetic primer"
cttgctggcgatgaactccaggctgtcgccgctggtgctcttgctgc

SEQ ID NO: 581 - DNA, 45 bp, Artificial Sequence
  source: /note="Description of Artificial Sequence: Synthetic primer"
ctggagttcatcgccagcaagctggccacagccgccctgggctgc

SEQ ID NO: 582 - DNA, 46 bp, Artificial Sequence
  source: /note="Description of Artificial Sequence: Synthetic primer"
cttgctggcgatgaactccaggctgtcgccgccgctggtgctcttg

SEQ ID NO: 583 - DNA, 48 bp, Artificial Sequence
  source: /note="Description of Artificial Sequence: Synthetic primer"
ctggagttcatcgccagcaagctggcccccgtgaccgtgtcctggaac

SEQ ID NO: 584 - DNA, 49 bp, Artificial Sequence
  source: /note="Description of Artificial Sequence: Synthetic primer"
cttgctggcgatgaactccaggctgtcctcggggaagtagtccttcacc

SEQ ID NO: 585 - DNA, 49 bp, Artificial Sequence
  source: /note="Description of Artificial Sequence: Synthetic primer"
ctggagttcatcgccagcaagctggccgtgaccgtgtcctggaacagcg

SEQ ID NO: 586 - DNA, 49 bp, Artificial Sequence
  source: /note="Description of Artificial Sequence: Synthetic primer"
cttgctggcgatgaactccaggctgtcgggctcggggaagtagtccttc

SEQ ID NO: 587 - DNA, 46 bp, Artificial Sequence
  source: /note="Description of Artificial Sequence: Synthetic primer"
ctggagttcatcgccagcaagctggccagcggagccctgacctccg

SEQ ID NO: 588 - DNA, 48 bp, Artificial Sequence
  source: /note="Description of Artificial Sequence: Synthetic primer"
cttgctggcgatgaactccaggctgtcgttccaggacacggtcacggg

SEQ ID NO: 589 - DNA, 51 bp, Artificial Sequence
  source: /note="Description of Artificial Sequence: Synthetic primer"
ctggagttcatcgccagcaagctggccggagccctgacctccggcgtgcac

SEQ ID NO: 590 - DNA, 49 bp, Artificial Sequence
  source: /note="Description of Artificial Sequence: Synthetic primer"
cttgctggcgatgaactccaggctgtcgctgttccaggacacggtcacg

SEQ ID NO: 591 - DNA, 45 bp, Artificial Sequence
  source: /note="Description of Artificial Sequence: Synthetic primer"
ctggagttcatcgccagcaagctggccgccctgacctccggcgtg

SEQ ID NO: 592 - DNA, 47 bp, Artificial Sequence
  source: /note="Description of Artificial Sequence: Synthetic primer"
cttgctggcgatgaactccaggctgtctccgctgttccaggacacgg

SEQ ID NO: 593 - DNA, 47 bp, Artificial Sequence
  source: /note="Description of Artificial Sequence: Synthetic primer"
ctggagttcatcgccagcaagctggccctgacctccggcgtgcacac

SEQ ID NO: 594 - DNA, 48 bp, Artificial Sequence
  source: /note="Description of Artificial Sequence: Synthetic primer"
cttgctggcgatgaactccaggctgtcggctccgctgttccaggacac

SEQ ID NO: 595 - DNA, 48 bp, Artificial Sequence
  source: /note="Description of Artificial Sequence: Synthetic primer"
ctggagttcatcgccagcaagctggccacctccggcgtgcacaccttc

SEQ ID NO: 596 - DNA, 47 bp, Artificial Sequence
  source: /note="Description of Artificial Sequence: Synthetic primer"
cttgctggcgatgaactccaggctgtccagggctccgctgttccagg

SEQ ID NO: 597 - DNA, 47 bp, Artificial Sequence
  source: /note="Description of Artificial Sequence: Synthetic primer"
ctggagttcatcgccagcaagctggcctccggcgtgcacaccttccc

SEQ ID NO: 598 - DNA, 47 bp, Artificial Sequence
  source: /note="Description of Artificial Sequence: Synthetic primer"
cttgctggcgatgaactccaggctgtcggtcagggctccgctgttcc

SEQ ID NO: 599 - DNA, 46 bp, Artificial Sequence
  source: /note="Description of Artificial Sequence: Synthetic primer"
ctggagttcatcgccagcaagctggccggcgtgcacaccttccccg

SEQ ID NO: 600 - DNA, 46 bp, Artificial Sequence
  source: /note="Description of Artificial Sequence: Synthetic primer"
cttgctggcgatgaactccaggctgtcggaggtcagggctccgctg

SEQ ID NO: 601 - DNA, 46 bp, Artificial Sequence
  source: /note="Description of Artificial Sequence: Synthetic primer"
ctggagttcatcgccagcaagctggccgccgtgctgcagagcagcg

SEQ ID NO: 602 - DNA, 46 bp, Artificial Sequence
  source: /note="Description of Artificial Sequence: Synthetic primer"
cttgctggcgatgaactccaggctgtcggggaaggtgtgcacgccg

SEQ ID NO: 603 - DNA, 48 bp, Artificial Sequence
  source: /note="Description of Artificial Sequence: Synthetic primer"
ctggagttcatcgccagcaagctggccagcggcctgtacagcctgtcc

SEQ ID NO: 604 - DNA, 45 bp, Artificial Sequence
  source: /note="Description of Artificial Sequence: Synthetic primer"
cttgctggcgatgaactccaggctgtcgctctgcagcacggcggg

SEQ ID NO: 605 - DNA, 48 bp, Artificial Sequence
  source: /note="Description of Artificial Sequence: Synthetic primer"
ctggagttcatcgccagcaagctggccggcctgtacagcctgtccagc

SEQ ID NO: 606 - DNA, 46 bp, Artificial Sequence
  source: /note="Description of Artificial Sequence: Synthetic primer"
cttgctggcgatgaactccaggctgtcgctgctctgcagcacggcg

SEQ ID NO: 607 - DNA, 46 bp, Artificial Sequence
  source: /note="Description of Artificial Sequence: Synthetic primer"
ctggagttcatcgccagcaagctggccagcagcagcctgggcaccc

SEQ ID NO: 608 - DNA, 47 bp, Artificial Sequence
  source: /note="Description of Artificial Sequence: Synthetic primer"
cttgctggcgatgaactccaggctgtcgggcactgtcaccacgctgg

SEQ ID NO: 609 - DNA, 47 bp, Artificial Sequence
  source: /note="Description of Artificial Sequence: Synthetic primer"
ctggagttcatcgccagcaagctggccagcagcctgggcacccagac

SEQ ID NO: 610 - DNA, 47 bp, Artificial Sequence
  source: /note="Description of Artificial Sequence: Synthetic primer"
cttgctggcgatgaactccaggctgtcgctgggcactgtcaccacgc

SEQ ID NO: 611 - DNA, 48 bp, Artificial Sequence
  source: /note="Description of Artificial Sequence: Synthetic primer"
ctggagttcatcgccagcaagctggccagcctgggcacccagacctac

SEQ ID NO: 612 - DNA, 48 bp, Artificial Sequence
  source: /note="Description of Artificial Sequence: Synthetic primer"
cttgctggcgatgaactccaggctgtcgctgctgggcactgtcaccac

SEQ ID NO: 613 - DNA, 48 bp, Artificial Sequence
  source: /note="Description of Artificial Sequence: Synthetic primer"
ctggagttcatcgccagcaagctggccctgggcacccagacctacatc

SEQ ID NO: 614 - DNA, 48 bp, Artificial Sequence
  source: /note="Description of Artificial Sequence: Synthetic primer"
cttgctggcgatgaactccaggctgtcgctgctgctgggcactgtcac

SEQ ID NO: 615 - DNA, 48 bp, Artificial Sequence
  source: /note="Description of Artificial Sequence: Synthetic primer"
ctggagttcatcgccagcaagctggccggcacccagacctacatctgc

SEQ ID NO: 616 - DNA, 47 bp, Artificial Sequence
  source: /note="Description of Artificial Sequence: Synthetic primer"
cttgctggcgatgaactccaggctgtccaggctgctgctgggcactg

SEQ ID NO: 617 - DNA, 51 bp, Artificial Sequence
  source: /note="Description of Artificial Sequence: Synthetic primer"
ctggagttcatcgccagcaagctggccacccagacctacatctgcaacgtg

SEQ ID NO: 618 - DNA, 45 bp, Artificial Sequence
  source: /note="Description of Artificial Sequence: Synthetic primer"
cttgctggcgatgaactccaggctgtcgcccaggctgctgctggg

SEQ ID NO: 619 - DNA, 51 bp, Artificial Sequence
  source: /note="Description of Artificial Sequence: Synthetic primer"
ctggagttcatcgccagcaagctggcccagacctacatctgcaacgtgaac

SEQ ID NO: 620 - DNA, 46 bp, Artificial Sequence
  source: /note="Description of Artificial Sequence: Synthetic primer"
cttgctggcgatgaactccaggctgtcggtgcccaggctgctgctg

SEQ ID NO: 621 - DNA, 51 bp, Artificial Sequence
  source: /note="Description of Artificial Sequence: Synthetic primer"
ctggagttcatcgccagcaagctggccacctacatctgcaacgtgaaccac

SEQ ID NO: 622 - DNA, 46 bp, Artificial Sequence
  source: /note="Description of Artificial Sequence: Synthetic primer"
cttgctggcgatgaactccaggctgtcctgggtgcccaggctgctg

SEQ ID NO: 623 - DNA, 48 bp, Artificial Sequence
  source: /note="Description of Artificial Sequence: Synthetic primer"
ctggagttcatcgccagcaagctggcccccagcaacaccaaggtggac

SEQ ID NO: 624 - DNA, 53 bp, Artificial Sequence
  source: /note="Description of Artificial Sequence: Synthetic primer"
cttgctggcgatgaactccaggctgtccttgtggttcacgttgcagatgtagg

SEQ ID NO: 625 - DNA, 52 bp, Artificial Sequence
  source: /note="Description of Artificial Sequence: Synthetic primer"
ctggagttcatcgccagcaagctggccagcaacaccaaggtggacaagaaag

SEQ ID NO: 626 - DNA, 49 bp, Artificial Sequence
  source: /note="Description of Artificial Sequence: Synthetic primer"
cttgctggcgatgaactccaggctgtcgggcttgtggttcacgttgcag

SEQ ID NO: 627 - DNA, 52 bp, Artificial Sequence
  source: /note="Description of Artificial Sequence: Synthetic primer"
ctggagttcatcgccagcaagctggccaacaccaaggtggacaagaaagtgg

SEQ ID NO: 628 - DNA, 49 bp, Artificial Sequence
  source: /note="Description of Artificial Sequence: Synthetic primer"
cttgctggcgatgaactccaggctgtcgctgggcttgtggttcacgttg

SEQ ID NO: 629 - DNA, 45 bp, Artificial Sequence
  source: /note="Description of Artificial Sequence: Synthetic primer"
ctggagttcatcgccagcaagctggccgccccagagctgctgggc

SEQ ID NO: 630 - DNA, 46 bp, Artificial Sequence
  source: /note="Description of Artificial Sequence: Synthetic primer"
cttgctggcgatgaactccaggctgtctgggcagggggggcaggtg

SEQ ID NO: 631 - DNA, 46 bp, Artificial Sequence
  source: /note="Description of Artificial Sequence: Synthetic primer"
ctggagttcatcgccagcaagctggccccagagctgctgggcggac

SEQ ID NO: 632 - DNA, 44 bp, Artificial Sequence
  source: /note="Description of Artificial Sequence: Synthetic primer"
cttgctggcgatgaactccaggctgtcggctgggcagggggggc

SEQ ID NO: 633 - DNA, 45 bp, Artificial Sequence
  source: /note="Description of Artificial Sequence: Synthetic primer"
ctggagttcatcgccagcaagctggccgagctgctgggcggaccc

SEQ ID NO: 634 - DNA, 45 bp, Artificial Sequence
  source: /note="Description of Artificial Sequence: Synthetic primer"
cttgctggcgatgaactccaggctgtctggggctgggcagggggg

SEQ ID NO: 635 - DNA, 45 bp, Artificial Sequence
  source: /note="Description of Artificial Sequence: Synthetic primer"
ctggagttcatcgccagcaagctggccctgctgggcggaccctcc

SEQ ID NO: 636 - DNA, 45 bp, Artificial Sequence
  source: /note="Description of Artificial Sequence: Synthetic primer"
cttgctggcgatgaactccaggctgtcctctggggctgggcaggg

SEQ ID NO: 637 - DNA, 45 bp, Artificial Sequence
  source: /note="Description of Artificial Sequence: Synthetic primer"
ctggagttcatcgccagcaagctggccctgggcggaccctccgtg

SEQ ID NO: 638 - DNA, 46 bp, Artificial Sequence
  source: /note="Description of Artificial Sequence: Synthetic primer"
cttgctggcgatgaactccaggctgtccagctctggggctgggcag

SEQ ID NO: 639 - DNA, 46 bp, Artificial Sequence
  source: /note="Description of Artificial Sequence: Synthetic primer"
ctggagttcatcgccagcaagctggccggcggaccctccgtgttcc

SEQ ID NO: 640 - DNA, 46 bp, Artificial Sequence
  source: /note="Description of Artificial Sequence: Synthetic primer"
cttgctggcgatgaactccaggctgtccagcagctctggggctggg

SEQ ID NO: 641 - DNA, 49 bp, Artificial Sequence
  source: /note="Description of Artificial Sequence: Synthetic primer"
ctggagttcatcgccagcaagctggccggaccctccgtgttcctgttcc

SEQ ID NO: 642 - DNA, 45 bp, Artificial Sequence
  source: /note="Description of Artificial Sequence: Synthetic primer"
cttgctggcgatgaactccaggctgtcgcccagcagctctggggc

SEQ ID NO: 643 - DNA, 48 bp, Artificial Sequence
  source: /note="Description of Artificial Sequence: Synthetic primer"
ctggagttcatcgccagcaagctggcccccaagcccaaggacaccctg

SEQ ID NO: 644 - DNA, 48 bp, Artificial Sequence
  source: /note="Description of Artificial Sequence: Synthetic primer"
cttgctggcgatgaactccaggctgtcggggaacaggaacacggaggg

SEQ ID NO: 645 - DNA, 51 bp, Artificial Sequence
  source: /note="Description of Artificial Sequence: Synthetic primer"
ctggagttcatcgccagcaagctggccaagcccaaggacaccctgatgatc

SEQ ID NO: 646 - DNA, 47 bp, Artificial Sequence
  source: /note="Description of Artificial Sequence: Synthetic primer"
cttgctggcgatgaactccaggctgtcgggggggaacaggaacacgg

SEQ ID NO: 647 - DNA, 47 bp, Artificial Sequence
  source: /note="Description of Artificial Sequence: Synthetic primer"
ctggagttcatcgccagcaagctggccagcaggacccccgaggtgac

SEQ ID NO: 648 - DNA, 49 bp, Artificial Sequence
  source: /note="Description of Artificial Sequence: Synthetic primer"
cttgctggcgatgaactccaggctgtcgatcatcagggtgtccttgggc

SEQ ID NO: 649 - DNA, 47 bp, Artificial Sequence
  source: /note="Description of Artificial Sequence: Synthetic primer"
ctggagttcatcgccagcaagctggccaggacccccgaggtgacctg

SEQ ID NO: 650 - DNA, 50 bp, Artificial Sequence
  source: /note="Description of Artificial Sequence: Synthetic primer"
cttgctggcgatgaactccaggctgtcgctgatcatcagggtgtccttgg

SEQ ID NO: 651 - DNA, 46 bp, Artificial Sequence
  source: /note="Description of Artificial Sequence: Synthetic primer"
ctggagttcatcgccagcaagctggccacccccgaggtgacctgcg

SEQ ID NO: 652 - DNA, 49 bp, Artificial Sequence
  source: /note="Description of Artificial Sequence: Synthetic primer"
cttgctggcgatgaactccaggctgtccctgctgatcatcagggtgtcc

SEQ ID NO: 653 - DNA, 46 bp, Artificial Sequence
  source: /note="Description of Artificial Sequence: Synthetic primer"
ctggagttcatcgccagcaagctggcccccgaggtgacctgcgtgg

SEQ ID NO: 654 - DNA, 49 bp, Artificial Sequence
  source: /note="Description of Artificial Sequence: Synthetic primer"
cttgctggcgatgaactccaggctgtcggtcctgctgatcatcagggtg

SEQ ID NO: 655 - DNA, 48 bp, Artificial Sequence
  source: /note="Description of Artificial Sequence: Synthetic primer"
ctggagttcatcgccagcaagctggccgaggtgacctgcgtggtggtg

SEQ ID NO: 656 - DNA, 48 bp, Artificial Sequence
  source: /note="Description of Artificial Sequence: Synthetic primer"
cttgctggcgatgaactccaggctgtcgggggtcctgctgatcatcag

SEQ ID NO: 657 - DNA, 51 bp, Artificial Sequence
  source: /note="Description of Artificial Sequence: Synthetic primer"
ctggagttcatcgccagcaagctggcccacgaggacccagaggtgaagttc

SEQ ID NO: 658 - DNA, 47 bp, Artificial Sequence
  source: /note="Description of Artificial Sequence: Synthetic primer"
cttgctggcgatgaactccaggctgtcgctcacgtccaccaccacgc

SEQ ID NO: 659 - DNA, 51 bp, Artificial Sequence
  source: /note="Description of Artificial Sequence: Synthetic primer"
ctggagttcatcgccagcaagctggccgaggacccagaggtgaagttcaac

SEQ ID NO: 660 - DNA, 48 bp, Artificial Sequence
  source: /note="Description of Artificial Sequence: Synthetic primer"
cttgctggcgatgaactccaggctgtcgtggctcacgtccaccaccac

SEQ ID NO: 661 - DNA, 51 bp, Artificial Sequence
  source: /note="Description of Artificial Sequence: Synthetic primer"
ctggagttcatcgccagcaagctggccgacccagaggtgaagttcaactgg

SEQ ID NO: 662 - DNA, 48 bp, Artificial Sequence
  source: /note="Description of Artificial Sequence: Synthetic primer"
cttgctggcgatgaactccaggctgtcctcgtggctcacgtccaccac

SEQ ID NO: 663 - DNA, 51 bp, Artificial Sequence
  source: /note="Description of Artificial Sequence: Synthetic primer"
ctggagttcatcgccagcaagctggccccagaggtgaagttcaactggtac

SEQ ID NO: 664 - DNA, 48 bp, Artificial Sequence
  source: /note="Description of Artificial Sequence: Synthetic primer"
cttgctggcgatgaactccaggctgtcgtcctcgtggctcacgtccac

SEQ ID NO: 665 - DNA, 52 bp, Artificial Sequence
  source: /note="Description of Artificial Sequence: Synthetic primer"
ctggagttcatcgccagcaagctggccgaggtgaagttcaactggtacgtgg

SEQ ID NO: 666 - DNA, 48 bp, Artificial Sequence
  source: /note="Description of Artificial Sequence: Synthetic primer"
cttgctggcgatgaactccaggctgtctgggtcctcgtggctcacgtc

SEQ ID NO: 667 - DNA, 47 bp, Artificial Sequence
  source: /note="Description of Artificial Sequence: Synthetic primer"
ctggagttcatcgccagcaagctggccggcgtggaggtgcacaacgc

SEQ ID NO: 668 - DNA, 52 bp, Artificial Sequence
  source: /note="Description of Artificial Sequence: Synthetic primer"
cttgctggcgatgaactccaggctgtcgtccacgtaccagttgaacttcacc

SEQ ID NO: 669 - DNA, 49 bp, Artificial Sequence
  source: /note="Description of Artificial Sequence: Synthetic primer"
ctggagttcatcgccagcaagctggccaacgccaagaccaagcccagag

SEQ ID NO: 670 - DNA, 46 bp, Artificial Sequence
  source: /note="Description of Artificial Sequence: Synthetic primer"
cttgctggcgatgaactccaggctgtcgtgcacctccacgccgtcc

SEQ ID NO: 671 - DNA, 48 bp, Artificial Sequence
  source: /note="Description of Artificial Sequence: Synthetic primer"
ctggagttcatcgccagcaagctggccgccaagaccaagcccagagag

SEQ ID NO: 672 - DNA, 48 bp, Artificial Sequence
  source: /note="Description of Artificial Sequence: Synthetic primer"
cttgctggcgatgaactccaggctgtcgttgtgcacctccacgccgtc

SEQ ID NO: 673 - DNA, 51 bp, Artificial Sequence
  source: /note="Description of Artificial Sequence: Synthetic primer"
ctggagttcatcgccagcaagctggccagagaggagcagtacaacagcacc

SEQ ID NO: 674 - DNA, 48 bp, Artificial Sequence
  source: /note="Description of Artificial Sequence: Synthetic primer"
cttgctggcgatgaactccaggctgtcgggcttggtcttggcgttgtg

SEQ ID NO: 675 - DNA, 48 bp, Artificial Sequence
  source: /note="Description of Artificial Sequence: Synthetic primer"
ctggagttcatcgccagcaagctggccgtgctgcaccaggactggctg

SEQ ID NO: 676 - DNA, 47 bp, Artificial Sequence
  source: /note="Description of Artificial Sequence: Synthetic primer"
cttgctggcgatgaactccaggctgtcggtcagcacggacaccaccc

SEQ ID NO: 677 - DNA, 48 bp, Artificial Sequence
  source: /note="Description of Artificial Sequence: Synthetic primer"
ctggagttcatcgccagcaagctggccctgcaccaggactggctgaac

SEQ ID NO: 678 - DNA, 48 bp, Artificial Sequence
  source: /note="Description of Artificial Sequence: Synthetic primer"
cttgctggcgatgaactccaggctgtccacggtcagcacggacaccac

SEQ ID NO: 679 - DNA, 48 bp, Artificial Sequence
  source: /note="Description of Artificial Sequence: Synthetic primer"
ctggagttcatcgccagcaagctggcccaccaggactggctgaacggc

SEQ ID NO: 680 - DNA, 48 bp, Artificial Sequence
  source: /note="Description of Artificial Sequence: Synthetic primer"
cttgctggcgatgaactccaggctgtccagcacggtcagcacggacac

SEQ ID NO: 681 - DNA, 48 bp, Artificial Sequence
  source: /note="Description of Artificial Sequence: Synthetic primer"
ctggagttcatcgccagcaagctggcccaggactggctgaacggcaag

SEQ ID NO: 682 - DNA, 47 bp, Artificial Sequence
  source: /note="Description of Artificial Sequence: Synthetic primer"
cttgctggcgatgaactccaggctgtcgtgcagcacggtcagcacgg

SEQ ID NO: 683 - DNA, 51 bp, Artificial Sequence
  source: /note="Description of Artificial Sequence: Synthetic primer"
ctggagttcatcgccagcaagctggccggcaaggaatacaagtgcaaggtc

SEQ ID NO: 684 - DNA, 48 bp, Artificial Sequence
  source: /note="Description of Artificial Sequence: Synthetic primer"
cttgctggcgatgaactccaggctgtcgttcagccagtcctggtgcag

SEQ ID NO: 685 - DNA, 54 bp, Artificial Sequence
  source: /note="Description of Artificial Sequence: Synthetic primer"
ctggagttcatcgccagcaagctggccaaggaatacaagtgcaaggtctccaac

SEQ ID NO: 686 - DNA, 48 bp, Artificial Sequence
  source: /note="Description of Artificial Sequence: Synthetic primer"
cttgctggcgatgaactccaggctgtcgccgttcagccagtcctggtg

SEQ ID NO: 687 - DNA, 54 bp, Artificial Sequence
  source: /note="Description of Artificial Sequence: Synthetic primer"
ctggagttcatcgccagcaagctggccgaatacaagtgcaaggtctccaacaag

SEQ ID NO: 688 - DNA, 48 bp, Artificial Sequence
  source: /note="Description of Artificial Sequence: Synthetic primer"
cttgctggcgatgaactccaggctgtccttgccgttcagccagtcctg

SEQ ID NO: 689 - DNA, 45 bp, Artificial Sequence
  source: /note="Description of Artificial Sequence: Synthetic primer"
ctggagttcatcgccagcaagctggccgccctgccagcccccatc

SEQ ID NO: 690 - DNA, 54 bp, Artificial Sequence
  source: /note="Description of Artificial Sequence: Synthetic primer"
cttgctggcgatgaactccaggctgtccttgttggagaccttgcacttgtattc

SEQ ID NO: 691 - DNA, 48 bp, Artificial Sequence
  source: /note="Description of Artificial Sequence: Synthetic primer"
ctggagttcatcgccagcaagctggccctgccagcccccatcgaaaag

SEQ ID NO: 692 - DNA, 49 bp, Artificial Sequence
  source: /note="Description of Artificial Sequence: Synthetic primer"
cttgctggcgatgaactccaggctgtcggccttgttggagaccttgcac

SEQ ID NO: 693 - DNA, 48 bp, Artificial Sequence
  source: /note="Description of Artificial Sequence: Synthetic primer"
ctggagttcatcgccagcaagctggccccagcccccatcgaaaagacc

SEQ ID NO: 694 - DNA, 49 bp, Artificial Sequence
  source: /note="Description of Artificial Sequence: Synthetic primer"
cttgctggcgatgaactccaggctgtccagggccttgttggagaccttg

SEQ ID NO: 695 - DNA, 50 bp, Artificial Sequence
  source: /note="Description of Artificial Sequence: Synthetic primer"
ctggagttcatcgccagcaagctggccgcccccatcgaaaagaccatcag

SEQ ID NO: 696 - DNA, 48 bp, Artificial Sequence
  source: /note="Description of Artificial Sequence: Synthetic primer"
cttgctggcgatgaactccaggctgtctggcagggccttgttggagac

SEQ ID NO: 697 - DNA, 51 bp, Artificial Sequence
  source: /note="Description of Artificial Sequence: Synthetic primer"
ctggagttcatcgccagcaagctggcccccatcgaaaagaccatcagcaag

SEQ ID NO: 698 - DNA, 47 bp, Artificial Sequence
  source: /note="Description of Artificial Sequence: Synthetic primer"
cttgctggcgatgaactccaggctgtcggctggcagggccttgttgg

SEQ ID NO: 699 - DNA, 46 bp, Artificial Sequence
  source: /note="Description of Artificial Sequence: Synthetic primer"
ctggagttcatcgccagcaagctggccaagggccagccacgggagc

SEQ ID NO: 700 - DNA, 52 bp, Artificial Sequence
  source: /note="Description of Artificial Sequence: Synthetic primer"
cttgctggcgatgaactccaggctgtcggccttgctgatggtcttttcgatg

SEQ ID NO: 701 - DNA, 45 bp, Artificial Sequence
  source: /note="Description of Artificial Sequence: Synthetic primer"
ctggagttcatcgccagcaagctggccggccagccacgggagccc

SEQ ID NO: 702 - DNA, 51 bp, Artificial Sequence
  source: /note="Description of Artificial Sequence: Synthetic primer"
cttgctggcgatgaactccaggctgtccttggccttgctgatggtcttttc

SEQ ID NO: 703 - DNA, 45 bp, Artificial Sequence
  source: /note="Description of Artificial Sequence: Synthetic primer"
ctggagttcatcgccagcaagctggcccagccacgggagccccag

SEQ ID NO: 704 - DNA, 49 bp, Artificial Sequence
  source: /note="Description of Artificial Sequence: Synthetic primer"
cttgctggcgatgaactccaggctgtcgcccttggccttgctgatggtc

SEQ ID NO: 705 - DNA, 45 bp, Artificial Sequence
  source: /note="Description of Artificial Sequence: Synthetic primer"
ctggagttcatcgccagcaagctggccccacgggagccccaggtg

SEQ ID NO: 706 - DNA, 49 bp, Artificial Sequence
  source: /note="Description of Artificial Sequence: Synthetic primer"
cttgctggcgatgaactccaggctgtcctggcccttggccttgctgatg

SEQ ID NO: 707 - DNA, 47 bp, Artificial Sequence
  source: /note="Description of Artificial Sequence: Synthetic primer"
ctggagttcatcgccagcaagctggcccgggagccccaggtgtacac

SEQ ID NO: 708 - DNA, 47 bp, Artificial Sequence
  source: /note="Description of Artificial Sequence: Synthetic primer"
cttgctggcgatgaactccaggctgtctggctggcccttggccttgc

SEQ ID NO: 709 - DNA, 48 bp, Artificial Sequence
  source: /note="Description of Artificial Sequence: Synthetic primer"
ctggagttcatcgccagcaagctggccgagccccaggtgtacaccctg

SEQ ID NO: 710 - DNA, 45 bp, Artificial Sequence
  source: /note="Description of Artificial Sequence: Synthetic primer"
cttgctggcgatgaactccaggctgtcccgtggctggcccttggc

SEQ ID NO: 711 - DNA, 51 bp, Artificial Sequence
  source: /note="Description of Artificial Sequence: Synthetic primer"
ctggagttcatcgccagcaagctggccgaggagatgaccaagaaccaggtg

SEQ ID NO: 712 - DNA, 44 bp, Artificial Sequence
  source: /note="Description of Artificial Sequence: Synthetic primer"
cttgctggcgatgaactccaggctgtcccgggaggggggcaggg

SEQ ID NO: 713 - DNA, 51 bp, Artificial Sequence
  source: /note="Description of Artificial Sequence: Synthetic primer"
ctggagttcatcgccagcaagctggccgagatgaccaagaaccaggtgtcc

SEQ ID NO: 714 - DNA, 45 bp, Artificial Sequence
  source: /note="Description of Artificial Sequence: Synthetic primer"
cttgctggcgatgaactccaggctgtcctcccgggaggggggcag

SEQ ID NO: 715 - DNA, 51 bp, Artificial Sequence
  source: /note="Description of Artificial Sequence: Synthetic primer"
ctggagttcatcgccagcaagctggccatgaccaagaaccaggtgtccctg

SEQ ID NO: 716 - DNA, 45 bp, Artificial Sequence
  source: /note="Description of Artificial Sequence: Synthetic primer"
cttgctggcgatgaactccaggctgtcctcctcccgggagggggg

SEQ ID NO: 717 - DNA, 50 bp, Artificial Sequence
  source: /note="Description of Artificial Sequence: Synthetic primer"
ctggagttcatcgccagcaagctggccaccaagaaccaggtgtccctgac

SEQ ID NO: 718 - DNA, 46 bp, Artificial Sequence
  source: /note="Description of Artificial Sequence: Synthetic primer"
cttgctggcgatgaactccaggctgtccatctcctcccgggagggg

SEQ ID NO: 719 - DNA, 50 bp, Artificial Sequence
  source: /note="Description of Artificial Sequence: Synthetic primer"
ctggagttcatcgccagcaagctggccaagaaccaggtgtccctgacctg

SEQ ID NO: 720 - DNA, 47 bp, Artificial Sequence
  source: /note="Description of Artificial Sequence: Synthetic primer"
cttgctggcgatgaactccaggctgtcggtcatctcctcccgggagg

SEQ ID NO: 721 - DNA, 49 bp, Artificial Sequence
  source: /note="Description of Artificial Sequence: Synthetic primer"
ctggagttcatcgccagcaagctggccaaccaggtgtccctgacctgtc

SEQ ID NO: 722 - DNA, 49 bp, Artificial Sequence
  source: /note="Description of Artificial Sequence: Synthetic primer"
cttgctggcgatgaactccaggctgtccttggtcatctcctcccgggag

SEQ ID NO: 723 - DNA, 48 bp, Artificial Sequence
  source: /note="Description of Artificial Sequence: Synthetic primer"
ctggagttcatcgccagcaagctggccggccagcccgagaacaactac

SEQ ID NO: 724 - DNA, 48 bp, Artificial Sequence
  source: /note="Description of Artificial Sequence: Synthetic primer"
cttgctggcgatgaactccaggctgtcgttgctctcccactccacggc

SEQ ID NO: 725 - DNA, 52 bp, Artificial Sequence
  source: /note="Description of Artificial Sequence: Synthetic primer"
ctggagttcatcgccagcaagctggccaacaactacaagaccacacctccag

SEQ ID NO: 726 - DNA, 46 bp, Artificial Sequence
  source: /note="Description of Artificial Sequence: Synthetic primer"
cttgctggcgatgaactccaggctgtcctcgggctggccgttgctc

SEQ ID NO: 727 - DNA, 52 bp, Artificial Sequence
  source: /note="Description of Artificial Sequence: Synthetic primer"
ctggagttcatcgccagcaagctggccaactacaagaccacacctccagtgc

SEQ ID NO: 728 - DNA, 47 bp, Artificial Sequence
  source: /note="Description of Artificial Sequence: Synthetic primer"
cttgctggcgatgaactccaggctgtcgttctcgggctggccgttgc

SEQ ID NO: 729 - DNA, 48 bp, Artificial Sequence
  source: /note="Description of Artificial Sequence: Synthetic primer"
ctggagttcatcgccagcaagctggcccctccagtgctggacagcgac

SEQ ID NO: 730 - DNA, 52 bp, Artificial Sequence
  source: /note="Description of Artificial Sequence: Synthetic primer"
cttgctggcgatgaactccaggctgtctgtggtcttgtagttgttctcgggc

SEQ ID NO: 731 - DNA, 47 bp, Artificial Sequence
  source: /note="Description of Artificial Sequence: Synthetic primer"
ctggagttcatcgccagcaagctggccccagtgctggacagcgacgg

SEQ ID NO: 732 - DNA, 52 bp, Artificial Sequence
  source: /note="Description of Artificial Sequence: Synthetic primer"
cttgctggcgatgaactccaggctgtcaggtgtggtcttgtagttgttctcg

SEQ ID NO: 733 - DNA, 48 bp, Artificial Sequence
  source: /note="Description of Artificial Sequence: Synthetic primer"
ctggagttcatcgccagcaagctggccagcgacggcagcttcttcctg

SEQ ID NO: 734 - DNA, 49 bp, Artificial Sequence
  source: /note="Description of Artificial Sequence: Synthetic primer"
cttgctggcgatgaactccaggctgtcgtccagcactggaggtgtggtc

SEQ ID NO: 735 - DNA, 50 bp, Artificial Sequence
  source: /note="Description of Artificial Sequence: Synthetic primer"
ctggagttcatcgccagcaagctggccgacggcagcttcttcctgtacag

SEQ ID NO: 736 - DNA, 49 bp, Artificial Sequence
  source: /note="Description of Artificial Sequence: Synthetic primer"
cttgctggcgatgaactccaggctgtcgctgtccagcactggaggtgtg

SEQ ID NO: 737 - DNA, 51 bp, Artificial Sequence
  source: /note="Description of Artificial Sequence: Synthetic primer"
ctggagttcatcgccagcaagctggccggcagcttcttcctgtacagcaag

SEQ ID NO: 738 - DNA, 48 bp, Artificial Sequence
  source: /note="Description of Artificial Sequence: Synthetic primer"
cttgctggcgatgaactccaggctgtcgtcgctgtccagcactggagg

SEQ ID NO: 739 - DNA, 48 bp, Artificial Sequence
  source: /note="Description of Artificial Sequence: Synthetic primer"
ctggagttcatcgccagcaagctggccaggtggcagcagggcaacgtg

SEQ ID NO: 740 - DNA, 49 bp, Artificial Sequence
  source: /note="Description of Artificial Sequence: Synthetic primer"
cttgctggcgatgaactccaggctgtcggacttgtccacggtcagcttg

SEQ ID NO: 741 - DNA, 48 bp, Artificial Sequence
  source: /note="Description of Artificial Sequence: Synthetic primer"
ctggagttcatcgccagcaagctggcctggcagcagggcaacgtgttc

SEQ ID NO: 742 - DNA, 48 bp, Artificial Sequence
  source: /note="Description of Artificial Sequence: Synthetic primer"
cttgctggcgatgaactccaggctgtccctggacttgtccacggtcag

SEQ ID NO: 743 - DNA, 48 bp, Artificial Sequence
  source: /note="Description of Artificial Sequence: Synthetic primer"
ctggagttcatcgccagcaagctggcccagcagggcaacgtgttcagc

SEQ ID NO: 744 - DNA, 49 bp, Artificial Sequence
  source: /note="Description of Artificial Sequence: Synthetic primer"
cttgctggcgatgaactccaggctgtcccacctggacttgtccacggtc

SEQ ID NO: 745 - DNA, 48 bp, Artificial Sequence
  source: /note="Description of Artificial Sequence: Synthetic primer"
ctggagttcatcgccagcaagctggcccagggcaacgtgttcagctgc

SEQ ID NO: 746 - DNA, 48 bp, Artificial Sequence
  source: /note="Description of Artificial Sequence: Synthetic primer"
cttgctggcgatgaactccaggctgtcctgccacctggacttgtccac

SEQ ID NO: 747 - DNA, 48 bp, Artificial Sequence
  source: /note="Description of Artificial Sequence: Synthetic primer"
ctggagttcatcgccagcaagctggccggcaacgtgttcagctgcagc

SEQ ID NO: 748 - DNA, 48 bp, Artificial Sequence
  source: /note="Description of Artificial Sequence: Synthetic primer"
cttgctggcgatgaactccaggctgtcctgctgccacctggacttgtc

SEQ ID NO: 749 - DNA, 51 bp, Artificial Sequence
  source: /note="Description of Artificial Sequence: Synthetic primer"
ctggagttcatcgccagcaagctggccaacgtgttcagctgcagcgtgatg

SEQ ID NO: 750 - DNA, 46 bp, Artificial Sequence
  source: /note="Description of Artificial Sequence: Synthetic primer"
cttgctggcgatgaactccaggctgtcgccctgctgccacctggac

SEQ ID NO: 751 - DNA, 49 bp, Artificial Sequence
  source: /note="Description of Artificial Sequence: Synthetic primer"
ctggagttcatcgccagcaagctggccgtgttcagctgcagcgtgatgc

SEQ ID NO: 752 - DNA, 47 bp, Artificial Sequence
  source: /note="Description of Artificial Sequence: Synthetic primer"
cttgctggcgatgaactccaggctgtcgttgccctgctgccacctgg

SEQ ID NO: 753 - DNA, 51 bp, Artificial Sequence
  source: /note="Description of Artificial Sequence: Synthetic primer"
ctggagttcatcgccagcaagctggccaaccactacacccagaagagcctg

SEQ ID NO: 754 - DNA, 48 bp, Artificial Sequence
  source: /note="Description of Artificial Sequence: Synthetic primer"
cttgctggcgatgaactccaggctgtcgtgcagggcctcgtgcatcac

SEQ ID NO: 755 - DNA, 50 bp, Artificial Sequence
  source: /note="Description of Artificial Sequence: Synthetic primer"
ctggagttcatcgccagcaagctggcccactacacccagaagagcctgag

SEQ ID NO: 756 - DNA, 49 bp, Artificial Sequence
  source: /note="Description of Artificial Sequence: Synthetic primer"
cttgctggcgatgaactccaggctgtcgttgtgcagggcctcgtgcatc

SEQ ID NO: 757 - DNA, 50 bp, Artificial Sequence
  source: /note="Description of Artificial Sequence: Synthetic primer"
ctggagttcatcgccagcaagctggccctgtcccccggcaagtaatctag

SEQ ID NO: 758 - DNA, 49 bp, Artificial Sequence
  source: /note="Description of Artificial Sequence: Synthetic primer"
cttgctggcgatgaactccaggctgtcgctcaggctcttctgggtgtag

SEQ ID NO: 759 - DNA, 51 bp, Artificial Sequence
  source: /note="Description of Artificial Sequence: Synthetic primer"
ctggagttcatcgccagcaagctggcctcccccggcaagtaatctagacac

SEQ ID NO: 760 - DNA, 49 bp, Artificial Sequence
  source: /note="Description of Artificial Sequence: Synthetic primer"
cttgctggcgatgaactccaggctgtccaggctcaggctcttctgggtg

SEQ ID NO: 761 - DNA, 51 bp, Artificial Sequence
  source: /note="Description of Artificial Sequence: Synthetic primer"
ctggagttcatcgccagcaagctggcccccggcaagtaatctagacacctc

SEQ ID NO: 762 - DNA, 48 bp, Artificial Sequence
  source: /note="Description of Artificial Sequence: Synthetic primer"
cttgctggcgatgaactccaggctgtcggacaggctcaggctcttctg

SEQ ID NO: 763 - DNA, 52 bp, Artificial Sequence
  source: /note="Description of Artificial Sequence: Synthetic primer"
ctggagttcatcgccagcaagctggccggcaagtaatctagacacctcagac

SEQ ID NO: 764 - DNA, 46 bp, Artificial Sequence
  source: /note="Description of Artificial Sequence: Synthetic primer"
cttgctggcgatgaactccaggctgtcgggggacaggctcaggctc

SEQ ID NO: 765 - DNA, 56 bp, Artificial Sequence
  source: /note="Description of Artificial Sequence: Synthetic primer"
ctggagttcatcgccagcaagctggccaagtaatctagacacctcagacaatcaac

SEQ ID NO: 766 - DNA, 45 bp, Artificial Sequence
  source: /note="Description of Artificial Sequence: Synthetic primer"
cttgctggcgatgaactccaggctgtcgccgggggacaggctcag

SEQ ID NO: 767 - DNA, 45 bp, Artificial Sequence
  source: /note="Description of Artificial Sequence: Synthetic primer"
ctgagctggctgctgagactgctgaacgtggccgctcccagcgtg

SEQ ID NO: 768 - DNA, 51 bp, Artificial Sequence
  source: /note="Description of Artificial Sequence: Synthetic primer"
tctcagcagccagctcaggctgtcgcccgttcgtttgatctccaccttggt

SEQ ID NO: 769 - DNA, 48 bp, Artificial Sequence
  source: /note="Description of Artificial Sequence: Synthetic primer"
ctgagctggctgctgagactgctgaacgccgctcccagcgtgttcatc

SEQ ID NO: 770 - DNA, 52 bp, Artificial Sequence
  source: /note="Description of Artificial Sequence: Synthetic primer"
tctcagcagccagctcaggctgtcgcccaccgttcgtttgatctccaccttg

SEQ ID NO: 771 - DNA, 49 bp, Artificial Sequence
  source: /note="Description of Artificial Sequence: Synthetic primer"
ctgagctggctgctgagactgctgaacgctcccagcgtgttcatcttcc

SEQ ID NO: 772 - DNA, 49 bp, Artificial Sequence
  source: /note="Description of Artificial Sequence: Synthetic primer"
tctcagcagccagctcaggctgtcgccggccaccgttcgtttgatctcc

SEQ ID NO: 773 - DNA, 48 bp, Artificial Sequence
  source: /note="Description of Artificial Sequence: Synthetic primer"
ctgagctggctgctgagactgctgaaccccagcgacgagcagctgaag

SEQ ID NO: 774 - DNA, 48 bp, Artificial Sequence
  source: /note="Description of Artificial Sequence: Synthetic primer"
tctcagcagccagctcaggctgtcgccggggaagatgaacacgctggg

SEQ ID NO: 775 - DNA, 48 bp, Artificial Sequence
  source: /note="Description of Artificial Sequence: Synthetic primer"
ctgagctggctgctgagactgctgaacagcgacgagcagctgaagagc

SEQ ID NO: 776 - DNA, 49 bp, Artificial Sequence
  source: /note="Description of Artificial Sequence: Synthetic primer"
tctcagcagccagctcaggctgtcgccgggggggaagatgaacacgctg

SEQ ID NO: 777 - DNA, 48 bp, Artificial Sequence
  source: /note="Description of Artificial Sequence: Synthetic primer"
ctgagctggctgctgagactgctgaacgacgagcagctgaagagcggc

SEQ ID NO: 778 - DNA, 48 bp, Artificial Sequence
  source: /note="Description of Artificial Sequence: Synthetic primer"
tctcagcagccagctcaggctgtcgccgctgggggggaagatgaacac

SEQ ID NO: 779 - DNA, 48 bp, Artificial Sequence
  source: /note="Description of Artificial Sequence: Synthetic primer"
ctgagctggctgctgagactgctgaacgagcagctgaagagcggcacc

SEQ ID NO: 780 - DNA, 49 bp, Artificial Sequence
  source: /note="Description of Artificial Sequence: Synthetic primer"
tctcagcagccagctcaggctgtcgccgtcgctgggggggaagatgaac

SEQ ID NO: 781 - DNA, 45 bp, Artificial Sequence
  source: /note="Description of Artificial Sequence: Synthetic primer"
ctgagctggctgctgagactgctgaacccccgggaggccaaggtg

SEQ ID NO: 782 - DNA, 51 bp, Artificial Sequence
  source: /note="Description of Artificial Sequence: Synthetic primer"
tctcagcagccagctcaggctgtcgccgtagaagttgttcagcaggcacac

SEQ ID NO: 783 - DNA, 47 bp, Artificial Sequence
  source: /note="Description of Artificial Sequence: Synthetic primer"
ctgagctggctgctgagactgctgaaccgggaggccaaggtgcagtg

SEQ ID NO: 784 - DNA, 50 bp, Artificial Sequence
  source: /note="Description of Artificial Sequence: Synthetic primer"
tctcagcagccagctcaggctgtcgccggggtagaagttgttcagcaggc

SEQ ID NO: 785 - DNA, 48 bp, Artificial Sequence
  source: /note="Description of Artificial Sequence: Synthetic primer"
ctgagctggctgctgagactgctgaacgaggccaaggtgcagtggaag

SEQ ID NO: 786 - DNA, 49 bp, Artificial Sequence
  source: /note="Description of Artificial Sequence: Synthetic primer"
tctcagcagccagctcaggctgtcgccccgggggtagaagttgttcagc

SEQ ID NO: 787 - DNA, 48 bp, Artificial Sequence
  source: /note="Description of Artificial Sequence: Synthetic primer"
ctgagctggctgctgagactgctgaacgccaaggtgcagtggaaggtg

SEQ ID NO: 788 - DNA, 49 bp, Artificial Sequence
  source: /note="Description of Artificial Sequence: Synthetic primer"
tctcagcagccagctcaggctgtcgccctcccgggggtagaagttgttc

SEQ ID NO: 789 - DNA, 48 bp, Artificial Sequence
  source: /note="Description of Artificial Sequence: Synthetic primer"
ctgagctggctgctgagactgctgaacaacgccctgcagagcggcaac

SEQ ID NO: 790 - DNA, 49 bp, Artificial Sequence
  source: /note="Description of Artificial Sequence: Synthetic primer"
tctcagcagccagctcaggctgtcgccgtccaccttccactgcaccttg

SEQ ID NO: 791 - DNA, 47 bp, Artificial Sequence
  source: /note="Description of Artificial Sequence: Synthetic primer"
ctgagctggctgctgagactgctgaacgccctgcagagcggcaacag

SEQ ID NO: 792 - DNA, 49 bp, Artificial Sequence
  source: /note="Description of Artificial Sequence: Synthetic primer"
tctcagcagccagctcaggctgtcgccgttgtccaccttccactgcacc

SEQ ID NO: 793 - DNA, 48 bp, Artificial Sequence
  source: /note="Description of Artificial Sequence: Synthetic primer"
ctgagctggctgctgagactgctgaacctgcagagcggcaacagccag

SEQ ID NO: 794 - DNA, 48 bp, Artificial Sequence
  source: /note="Description of Artificial Sequence: Synthetic primer"
tctcagcagccagctcaggctgtcgccggcgttgtccaccttccactg

SEQ ID NO: 795 - DNA, 48 bp, Artificial Sequence
  source: /note="Description of Artificial Sequence: Synthetic primer"
ctgagctggctgctgagactgctgaaccagagcggcaacagccaggag

SEQ ID NO: 796 - DNA, 49 bp, Artificial Sequence
  source: /note="Description of Artificial Sequence: Synthetic primer"
tctcagcagccagctcaggctgtcgcccagggcgttgtccaccttccac

SEQ ID NO: 797 - DNA, 48 bp, Artificial Sequence
  source: /note="Description of Artificial Sequence: Synthetic primer"
ctgagctggctgctgagactgctgaacagcggcaacagccaggagagc

SEQ ID NO: 798 - DNA, 49 bp, Artificial Sequence
  source: /note="Description of Artificial Sequence: Synthetic primer"
tctcagcagccagctcaggctgtcgccctgcagggcgttgtccaccttc

SEQ ID NO: 799 - DNA, 48 bp, Artificial Sequence
  source: /note="Description of Artificial Sequence: Synthetic primer"
ctgagctggctgctgagactgctgaacagcgtcaccgagcaggacagc

SEQ ID NO: 800 - DNA, 48 bp, Artificial Sequence
  source: /note="Description of Artificial Sequence: Synthetic primer"
tctcagcagccagctcaggctgtcgccctcctggctgttgccgctctg

SEQ ID NO: 801 - DNA, 48 bp, Artificial Sequence
  source: /note="Description of Artificial Sequence: Synthetic primer"
ctgagctggctgctgagactgctgaacgtcaccgagcaggacagcaag

SEQ ID NO: 802 - DNA, 47 bp, Artificial Sequence
  source: /note="Description of Artificial Sequence: Synthetic primer"
tctcagcagccagctcaggctgtcgccgctctcctggctgttgccgc

SEQ ID NO: 803 - DNA, 48 bp, Artificial Sequence
  source: /note="Description of Artificial Sequence: Synthetic primer"
ctgagctggctgctgagactgctgaacaccgagcaggacagcaaggac

SEQ ID NO: 804 - DNA, 48 bp, Artificial Sequence
  source: /note="Description of Artificial Sequence: Synthetic primer"
tctcagcagccagctcaggctgtcgccgacgctctcctggctgttgcc

SEQ ID NO: 805 - DNA, 48 bp, Artificial Sequence
  source: /note="Description of Artificial Sequence: Synthetic primer"
ctgagctggctgctgagactgctgaacgagcaggacagcaaggactcc

SEQ ID NO: 806 - DNA, 49 bp, Artificial Sequence
  source: /note="Description of Artificial Sequence: Synthetic primer"
tctcagcagccagctcaggctgtcgccggtgacgctctcctggctgttg

SEQ ID NO: 807 - DNA, 48 bp, Artificial Sequence
  source: /note="Description of Artificial Sequence: Synthetic primer"
ctgagctggctgctgagactgctgaaccaggacagcaaggactccacc

SEQ ID NO: 808 - DNA, 47 bp, Artificial Sequence
  source: /note="Description of Artificial Sequence: Synthetic primer"
tctcagcagccagctcaggctgtcgccctcggtgacgctctcctggc

SEQ ID NO: 809 - DNA, 50 bp, Artificial Sequence
  source: /note="Description of Artificial Sequence: Synthetic primer"
ctgagctggctgctgagactgctgaacgacagcaaggactccacctacag

SEQ ID NO: 810 - DNA, 48 bp, Artificial Sequence
  source: /note="Description of Artificial Sequence: Synthetic primer"
tctcagcagccagctcaggctgtcgccctgctcggtgacgctctcctg

SEQ ID NO: 811 - DNA, 49 bp, Artificial Sequence
  source: /note="Description of Artificial Sequence: Synthetic primer"
ctgagctggctgctgagactgctgaacagcaaggactccacctacagcc

SEQ ID NO: 812 - DNA, 48 bp, Artificial Sequence
  source: /note="Description of Artificial Sequence: Synthetic primer"
tctcagcagccagctcaggctgtcgccgtcctgctcggtgacgctctc

SEQ ID NO: 813 - DNA, 46 bp, Artificial Sequence
  source: /note="Description of Artificial Sequence: Synthetic primer"
ctgagctggctgctgagactgctgaaccaccagggcctgtccagcc

SEQ ID NO: 814 - DNA, 48 bp, Artificial Sequence
  source: /note="Description of Artificial Sequence: Synthetic primer"
tctcagcagccagctcaggctgtcgccggtcacctcgcaggcgtacac

SEQ ID NO: 815 - DNA, 45 bp, Artificial Sequence
  source: /note="Description of Artificial Sequence: Synthetic primer"
ctgagctggctgctgagactgctgaaccagggcctgtccagcccc

SEQ ID NO: 816 - DNA, 46 bp, Artificial Sequence
  source: /note="Description of Artificial Sequence: Synthetic primer"
tctcagcagccagctcaggctgtcgccgtgggtcacctcgcaggcg

SEQ ID NO: 817 - DNA, 45 bp, Artificial Sequence
  source: /note="Description of Artificial Sequence: Synthetic primer"
ctgagctggctgctgagactgctgaacggcctgtccagccccgtg

SEQ ID NO: 818 - DNA, 47 bp, Artificial Sequence
  source: /note="Description of Artificial Sequence: Synthetic primer"
tctcagcagccagctcaggctgtcgccctggtgggtcacctcgcagg

SEQ ID NO: 819 - DNA, 48 bp, Artificial Sequence
  source: /note="Description of Artificial Sequence: Synthetic primer"
ctgagctggctgctgagactgctgaacctgtccagccccgtgaccaag

SEQ ID NO: 820 - DNA, 46 bp, Artificial Sequence
  source: /note="Description of Artificial Sequence: Synthetic primer"
tctcagcagccagctcaggctgtcgccgccctggtgggtcacctcg

SEQ ID NO: 821 - DNA, 48 bp, Artificial Sequence
  source: /note="Description of Artificial Sequence: Synthetic primer"
ctgagctggctgctgagactgctgaactccagccccgtgaccaagagc

SEQ ID NO: 822 - DNA, 46 bp, Artificial Sequence
  source: /note="Description of Artificial Sequence: Synthetic primer"
tctcagcagccagctcaggctgtcgcccaggccctggtgggtcacc

SEQ ID NO: 823 - DNA, 48 bp, Artificial Sequence
  source: /note="Description of Artificial Sequence: Synthetic primer"
ctgagctggctgctgagactgctgaacagccccgtgaccaagagcttc

SEQ ID NO: 824 - DNA, 46 bp, Artificial Sequence
  source: /note="Description of Artificial Sequence: Synthetic primer"
tctcagcagccagctcaggctgtcgccggacaggccctggtgggtc

SEQ ID NO: 825 - DNA, 50 bp, Artificial Sequence
  source: /note="Description of Artificial Sequence: Synthetic primer"
ctgagctggctgctgagactgctgaaccccgtgaccaagagcttcaacag

SEQ ID NO: 826 - DNA, 46 bp, Artificial Sequence
  source: /note="Description of Artificial Sequence: Synthetic primer"
tctcagcagccagctcaggctgtcgccgctggacaggccctggtgg

SEQ ID NO: 827 - DNA, 48 bp, Artificial Sequence
  source: /note="Description of Artificial Sequence: Synthetic primer"
ctgagctggctgctgagactgctgaacagcttcaacaggggcgagtgc

SEQ ID NO: 828 - DNA, 48 bp, Artificial Sequence
  source: /note="Description of Artificial Sequence: Synthetic primer"
tctcagcagccagctcaggctgtcgcccttggtcacggggctggacag

SEQ ID NO: 829 - DNA, 45 bp, Artificial Sequence
  source: /note="Description of Artificial Sequence: Synthetic primer"
ctggagttcatcgccagcaagctggccgtggccgctcccagcgtg

SEQ ID NO: 830 - DNA, 51 bp, Artificial Sequence
  source: /note="Description of Artificial Sequence: Synthetic primer"
cttgctggcgatgaactccaggctgtccgttcgtttgatctccaccttggt

SEQ ID NO: 831 - DNA, 48 bp, Artificial Sequence
  source: /note="Description of Artificial Sequence: Synthetic primer"
ctggagttcatcgccagcaagctggccgccgctcccagcgtgttcatc

SEQ ID NO: 832 - DNA, 52 bp, Artificial Sequence
  source: /note="Description of Artificial Sequence: Synthetic primer"
cttgctggcgatgaactccaggctgtccaccgttcgtttgatctccaccttg

SEQ ID NO: 833 - DNA, 49 bp, Artificial Sequence
  source: /note="Description of Artificial Sequence: Synthetic primer"
ctggagttcatcgccagcaagctggccgctcccagcgtgttcatcttcc

SEQ ID NO: 834 - DNA, 49 bp, Artificial Sequence
  source: /note="Description of Artificial Sequence: Synthetic primer"
cttgctggcgatgaactccaggctgtcggccaccgttcgtttgatctcc

SEQ ID NO: 835 - DNA, 48 bp, Artificial Sequence
  source: /note="Description of Artificial Sequence: Synthetic primer"
ctggagttcatcgccagcaagctggcccccagcgacgagcagctgaag

SEQ ID NO: 836 - DNA, 48 bp, Artificial Sequence
  source: /note="Description of Artificial Sequence: Synthetic primer"
cttgctggcgatgaactccaggctgtcggggaagatgaacacgctggg

SEQ ID NO: 837 - DNA, 48 bp, Artificial Sequence
  source: /note="Description of Artificial Sequence: Synthetic primer"
ctggagttcatcgccagcaagctggccagcgacgagcagctgaagagc

SEQ ID NO: 838 - DNA, 49 bp, Artificial Sequence
  source: /note="Description of Artificial Sequence: Synthetic primer"
cttgctggcgatgaactccaggctgtcgggggggaagatgaacacgctg

SEQ ID NO: 839 - DNA, 48 bp, Artificial Sequence
  source: /note="Description of Artificial Sequence: Synthetic primer"
ctggagttcatcgccagcaagctggccgacgagcagctgaagagcggc

SEQ ID NO: 840 - DNA, 48 bp, Artificial Sequence
  source: /note="Description of Artificial Sequence: Synthetic primer"
cttgctggcgatgaactccaggctgtcgctgggggggaagatgaacac

SEQ ID NO: 841 - DNA, 48 bp, Artificial Sequence
  source: /note="Description of Artificial Sequence: Synthetic primer"
ctggagttcatcgccagcaagctggccgagcagctgaagagcggcacc

SEQ ID NO: 842 - DNA, 49 bp, Artificial Sequence
  source: /note="Description of Artificial Sequence: Synthetic primer"
cttgctggcgatgaactccaggctgtcgtcgctgggggggaagatgaac

SEQ ID NO: 843 - DNA, 45 bp, Artificial Sequence
  source: /note="Description of Artificial Sequence: Synthetic primer"
ctggagttcatcgccagcaagctggccccccgggaggccaaggtg

SEQ ID NO: 844 - DNA, 51 bp, Artificial Sequence
  source: /note="Description of Artificial Sequence: Synthetic primer"
cttgctggcgatgaactccaggctgtcgtagaagttgttcagcaggcacac

SEQ ID NO: 845 - DNA, 47 bp, Artificial Sequence
  source: /note="Description of Artificial Sequence: Synthetic primer"
ctggagttcatcgccagcaagctggcccgggaggccaaggtgcagtg

SEQ ID NO: 846 - DNA, 50 bp, Artificial Sequence
  source: /note="Description of Artificial Sequence: Synthetic primer"
cttgctggcgatgaactccaggctgtcggggtagaagttgttcagcaggc

SEQ ID NO: 847 - DNA, 48 bp, Artificial Sequence
  source: /note="Description of Artificial Sequence: Synthetic primer"
ctggagttcatcgccagcaagctggccgaggccaaggtgcagtggaag

SEQ ID NO: 848 - DNA, 49 bp, Artificial Sequence
  source: /note="Description of Artificial Sequence: Synthetic primer"
cttgctggcgatgaactccaggctgtcccgggggtagaagttgttcagc

SEQ ID NO: 849 - DNA, 48 bp, Artificial Sequence
  source: /note="Description of Artificial Sequence: Synthetic primer"
ctggagttcatcgccagcaagctggccgccaaggtgcagtggaaggtg

SEQ ID NO: 850 - DNA, 49 bp, Artificial Sequence
  source: /note="Description of Artificial Sequence: Synthetic primer"
cttgctggcgatgaactccaggctgtcctcccgggggtagaagttgttc

SEQ ID NO: 851 - DNA, 48 bp, Artificial Sequence
  source: /note="Description of Artificial Sequence: Synthetic primer"
ctggagttcatcgccagcaagctggccaacgccctgcagagcggcaac

SEQ ID NO: 852 - DNA, 49 bp, Artificial Sequence
  source: /note="Description of Artificial Sequence: Synthetic primer"
cttgctggcgatgaactccaggctgtcgtccaccttccactgcaccttg

SEQ ID NO: 853 - DNA, 47 bp, Artificial Sequence
  source: /note="Description of Artificial Sequence: Synthetic primer"
ctggagttcatcgccagcaagctggccgccctgcagagcggcaacag

SEQ ID NO: 854 - DNA, 49 bp, Artificial Sequence
  source: /note="Description of Artificial Sequence: Synthetic primer"
cttgctggcgatgaactccaggctgtcgttgtccaccttccactgcacc

SEQ ID NO: 855 - DNA, 48 bp, Artificial Sequence
  source: /note="Description of Artificial Sequence: Synthetic primer"
ctggagttcatcgccagcaagctggccctgcagagcggcaacagccag

SEQ ID NO: 856 - DNA, 48 bp, Artificial Sequence
  source: /note="Description of Artificial Sequence: Synthetic primer"
cttgctggcgatgaactccaggctgtcggcgttgtccaccttccactg

SEQ ID NO: 857 - DNA, 48 bp, Artificial Sequence
  source: /note="Description of Artificial Sequence: Synthetic primer"
ctggagttcatcgccagcaagctggcccagagcggcaacagccaggag

SEQ ID NO: 858 - DNA, 49 bp, Artificial Sequence
  source: /note="Description of Artificial Sequence: Synthetic primer"
cttgctggcgatgaactccaggctgtccagggcgttgtccaccttccac

SEQ ID NO: 859 - DNA, 48 bp, Artificial Sequence
  source: /note="Description of Artificial Sequence: Synthetic primer"
ctggagttcatcgccagcaagctggccagcggcaacagccaggagagc

SEQ ID NO: 860 - DNA, 49 bp, Artificial Sequence
  source: /note="Description of Artificial Sequence: Synthetic primer"
cttgctggcgatgaactccaggctgtcctgcagggcgttgtccaccttc

SEQ ID NO: 861 - DNA, 48 bp, Artificial Sequence
  source: /note="Description of Artificial Sequence: Synthetic primer"
ctggagttcatcgccagcaagctggccagcgtcaccgagcaggacagc

SEQ ID NO: 862 - DNA, 48 bp, Artificial Sequence
  source: /note="Description of Artificial Sequence: Synthetic primer"
cttgctggcgatgaactccaggctgtcctcctggctgttgccgctctg

SEQ ID NO: 863 - DNA, 48 bp, Artificial Sequence
  source: /note="Description of Artificial Sequence: Synthetic primer"
ctggagttcatcgccagcaagctggccgtcaccgagcaggacagcaag

SEQ ID NO: 864 - DNA, 47 bp, Artificial Sequence
  source: /note="Description of Artificial Sequence: Synthetic primer"
cttgctggcgatgaactccaggctgtcgctctcctggctgttgccgc

SEQ ID NO: 865 - DNA, 48 bp, Artificial Sequence
  source: /note="Description of Artificial Sequence: Synthetic primer"
ctggagttcatcgccagcaagctggccaccgagcaggacagcaaggac

SEQ ID NO: 866 - DNA, 48 bp, Artificial Sequence
  source: /note="Description of Artificial Sequence: Synthetic primer"
cttgctggcgatgaactccaggctgtcgacgctctcctggctgttgcc

SEQ ID NO: 867 - DNA, 48 bp, Artificial Sequence
  source: /note="Description of Artificial Sequence: Synthetic primer"
ctggagttcatcgccagcaagctggccgagcaggacagcaaggactcc

SEQ ID NO: 868 - DNA, 49 bp, Artificial Sequence
  source: /note="Description of Artificial Sequence: Synthetic primer"
cttgctggcgatgaactccaggctgtcggtgacgctctcctggctgttg

SEQ ID NO: 869 - DNA, 48 bp, Artificial Sequence
  source: /note="Description of Artificial Sequence: Synthetic primer"
ctggagttcatcgccagcaagctggcccaggacagcaaggactccacc

SEQ ID NO: 870 - DNA, 47 bp, Artificial Sequence
  source: /note="Description of Artificial Sequence: Synthetic primer"
cttgctggcgatgaactccaggctgtcctcggtgacgctctcctggc

SEQ ID NO: 871 - DNA, 50 bp, Artificial Sequence
  source: /note="Description of Artificial Sequence: Synthetic primer"
ctggagttcatcgccagcaagctggccgacagcaaggactccacctacag

SEQ ID NO: 872 - DNA, 48 bp, Artificial Sequence
  source: /note="Description of Artificial Sequence: Synthetic primer"
cttgctggcgatgaactccaggctgtcctgctcggtgacgctctcctg

SEQ ID NO: 873 - DNA, 49 bp, Artificial Sequence
  source: /note="Description of Artificial Sequence: Synthetic primer"
ctggagttcatcgccagcaagctggccagcaaggactccacctacagcc

SEQ ID NO: 874 - DNA, 48 bp, Artificial Sequence
  source: /note="Description of Artificial Sequence: Synthetic primer"
cttgctggcgatgaactccaggctgtcgtcctgctcggtgacgctctc

SEQ ID NO: 875 - DNA, 46 bp, Artificial Sequence
  source: /note="Description of Artificial Sequence: Synthetic primer"
ctggagttcatcgccagcaagctggcccaccagggcctgtccagcc

SEQ ID NO: 876 - DNA, 48 bp, Artificial Sequence
  source: /note="Description of Artificial Sequence: Synthetic primer"
cttgctggcgatgaactccaggctgtcggtcacctcgcaggcgtacac

SEQ ID NO: 877 - DNA, 45 bp, Artificial Sequence
  source: /note="Description of Artificial Sequence: Synthetic primer"
ctggagttcatcgccagcaagctggcccagggcctgtccagcccc

SEQ ID NO: 878 - DNA, 46 bp, Artificial Sequence
  source: /note="Description of Artificial Sequence: Synthetic primer"
cttgctggcgatgaactccaggctgtcgtgggtcacctcgcaggcg

SEQ ID NO: 879 - DNA, 45 bp, Artificial Sequence
  source: /note="Description of Artificial Sequence: Synthetic primer"
ctggagttcatcgccagcaagctggccggcctgtccagccccgtg

SEQ ID NO: 880 - DNA, 47 bp, Artificial Sequence
  source: /note="Description of Artificial Sequence: Synthetic primer"
cttgctggcgatgaactccaggctgtcctggtgggtcacctcgcagg

SEQ ID NO: 881 - DNA, 48 bp, Artificial Sequence
  source: /note="Description of Artificial Sequence: Synthetic primer"
ctggagttcatcgccagcaagctggccctgtccagccccgtgaccaag

SEQ ID NO: 882 - DNA, 46 bp, Artificial Sequence
  source: /note="Description of Artificial Sequence: Synthetic primer"
cttgctggcgatgaactccaggctgtcgccctggtgggtcacctcg

SEQ ID NO: 883 - DNA, 48 bp, Artificial Sequence
  source: /note="Description of Artificial Sequence: Synthetic primer"
ctggagttcatcgccagcaagctggcctccagccccgtgaccaagagc

SEQ ID NO: 884 - DNA, 46 bp, Artificial Sequence
  source: /note="Description of Artificial Sequence: Synthetic primer"
cttgctggcgatgaactccaggctgtccaggccctggtgggtcacc

SEQ ID NO: 885 - DNA, 48 bp, Artificial Sequence
  source: /note="Description of Artificial Sequence: Synthetic primer"
ctggagttcatcgccagcaagctggccagccccgtgaccaagagcttc

SEQ ID NO: 886 - DNA, 46 bp, Artificial Sequence
  source: /note="Description of Artificial Sequence: Synthetic primer"
cttgctggcgatgaactccaggctgtcggacaggccctggtgggtc

SEQ ID NO: 887 - DNA, 50 bp, Artificial Sequence
  source: /note="Description of Artificial Sequence: Synthetic primer"
ctggagttcatcgccagcaagctggcccccgtgaccaagagcttcaacag

SEQ ID NO: 888 - DNA, 46 bp, Artificial Sequence
  source: /note="Description of Artificial Sequence: Synthetic primer"
cttgctggcgatgaactccaggctgtcgctggacaggccctggtgg

SEQ ID NO: 889 - DNA, 48 bp, Artificial Sequence
  source: /note="Description of Artificial Sequence: Synthetic primer"
ctggagttcatcgccagcaagctggccagcttcaacaggggcgagtgc

SEQ ID NO: 890 - DNA, 48 bp, Artificial Sequence
  source: /note="Description of Artificial Sequence: Synthetic primer"
cttgctggcgatgaactccaggctgtccttggtcacggggctggacag

SEQ ID NO: 891 - DNA, 45 bp, Artificial Sequence
  source: /note="Description of Artificial Sequence: Synthetic primer"
gaaggagatatacatatgaaaatttatgggatttacatggatcgc

SEQ ID NO: 892 - DNA, 44 bp, Artificial Sequence
  source: /note="Description of Artificial Sequence: Synthetic primer"
gtggtggtggtggtggtgcagcaattcttcataggagaccatcg

SEQ ID NO: 893 - DNA, 22 bp, Artificial Sequence
  source: /note="Description of Artificial Sequence: Synthetic primer"
caccaccaccaccaccactgag

SEQ ID NO: 894 - DNA, 41 bp, Artificial Sequence
  source: /note="Description of Artificial Sequence: Synthetic primer"
catatgtatatctccttcttaaagttaaacaaaattatttc

SEQ ID NO: 895 - DNA, 43 bp, Artificial Sequence
  source: /note="Description of Artificial Sequence: Synthetic primer"
gagaacctgtacttccaaggccaccaccaccaccaccactgag

SEQ ID NO: 896 - DNA, 47 bp, Artificial Sequence
  source: /note="Description of Artificial Sequence: Synthetic primer"
gccttggaagtacaggttctccagcaattcttcataggagaccatcg

SEQ ID NO: 897 - DNA, 41 bp, Artificial Sequence
  source: /note="Description of Artificial Sequence: Synthetic primer"
gtctttcatttcaccagaggagcgcgaaaaatgccgtcgct

SEQ ID NO: 898 - DNA, 41 bp, Artificial Sequence
  source: /note="Description of Artificial Sequence: Synthetic primer"
agcgacggcatttttcgcgctcctctggtgaaatgaaagac

SEQ ID NO: 899 - DNA, 39 bp, Artificial Sequence
  source: /note="Description of Artificial Sequence: Synthetic primer"
aaagaagatgctcaccgcgagctgctgggagatgtgctg

SEQ ID NO: 900 - DNA, 39 bp, Artificial Sequence
  source: /note="Description of Artificial Sequence: Synthetic primer"
cagcacatctcccagcagctcgcggtgagcatcttcttt

SEQ ID NO: 901 - DNA, 42 bp, Artificial Sequence
  source: /note="Description of Artificial Sequence: Synthetic primer"
gcaggaatatggcaaaccgtatattccagatcttccagatgc

SEQ ID NO: 902 - DNA, 42 bp, Artificial Sequence
  source: /note="Description of Artificial Sequence: Synthetic primer"
gcatctggaagatctggaatatacggtttgccatattcctgc

SEQ ID NO: 903 - DNA, 60 bp, Artificial Sequence
  source: /note="Description of Artificial Sequence: Synthetic primer"
aataattttgtttaactttaagaaggagatatacatatggcaatattaggtttaggcacg

SEQ ID NO: 904 - DNA, 47 bp, Artificial Sequence
  source: /note="Description of Artificial Sequence: Synthetic primer"
cagtggtggtggtggtggtgactttcaataattaccgtggcacaagc

SEQ ID NO: 905 - DNA, 20 bp, Artificial Sequence
  source: /note="Description of Artificial Sequence: Synthetic primer"
caccaccaccaccaccactg

SEQ ID NO: 906 - DNA, 36 bp, Artificial Sequence
  source: /note="Description of Artificial Sequence: Synthetic primer"
atgtatatctccttcttaaagttaaacaaaattatt

SEQ ID NO: 907 - DNA, 50 bp, Artificial Sequence
  source: /note="Description of Artificial Sequence: Synthetic primer"
ctggagttcatcgccagcaagctggccaagggccgtttcactataagcgc

SEQ ID NO: 908 - DNA, 54 bp, Artificial Sequence
  source: /note="Description of Artificial Sequence: Synthetic primer"
cttgctggcgatgaactccaggctatcggcatatctagtataaccattcgtagg

SEQ ID NO: 909 - DNA, 51 bp, Artificial Sequence
  source: /note="Description of Artificial Sequence: Synthetic primer"
gacagcctggagttcatcgccagcaaggtcaagggccgtttcactataagc

SEQ ID NO: 910 - DNA, 54 bp, Artificial Sequence
  source: /note="Description of Artificial Sequence: Synthetic primer"
cttgctggcgatgaactccaggctgtcggcatatctagtataaccattcgtagg

SEQ ID NO: 911 - DNA, 51 bp, Artificial Sequence
  source: /note="Description of Artificial Sequence: Synthetic primer"
gacagcctggagttcatcgccagcaagggccgtttcactataagcgcagac

SEQ ID NO: 912 - DNA, 54 bp, Artificial Sequence; identical to SEQ ID NO: 910
  source: /note="Description of Artificial Sequence: Synthetic primer"

SEQ ID NO: 913 - DNA, 54 bp, Artificial Sequence
  source: /note="Description of Artificial Sequence: Synthetic primer"
ctggagttcatcgccagcaagctggcccagccggaagacttcgcaacttattac

SEQ ID NO: 914 - DNA, 50 bp, Artificial Sequence
  source: /note="Description of Artificial Sequence: Synthetic primer"
cttgctggcgatgaactccaggctgtcgatggtcagagtgaaatccgtcc

SEQ ID NO: 915 - DNA, 49 bp, Artificial Sequence
  source: /note="Description of Artificial Sequence: Synthetic primer"
ctgagctggctgctgagactgctgaactgcctggtgaaggactacttcc

SEQ ID NO: 916 - DNA, 43 bp, Artificial Sequence
  source: /note="Description of Artificial Sequence: Synthetic primer"
tctcagcagccagctcaggctgtcgccgctgggggccaggggg

SEQ ID NO: 917 - DNA, 45 bp, Artificial Sequence
  source: /note="Description of Artificial Sequence: Synthetic primer"
ctgagctggctgctgagactgctgaacacagccgccctgggctgc

SEQ ID NO: 918 - DNA, 44 bp, Artificial Sequence
  source: /note="Description of Artificial Sequence: Synthetic primer"
tctcagcagccagctcaggctgtcgccgctgctgggggccaggg

SEQ ID NO: 919 - DNA, 39 bp, Artificial Sequence
  source: /note="Description of Artificial Sequence: Synthetic primer"
ggcgacagcctgagctggctggccctgggctgcctggtg

SEQ ID NO: 920 - DNA, 40 bp, Artificial Sequence
  source: /note="Description of Artificial Sequence: Synthetic primer"
cagccagctcaggctgtcgcccttgctgctgggggccagg

SEQ ID NO: 921 - DNA, 33 bp, Artificial Sequence
  source: /note="Description of Artificial Sequence: Synthetic primer"
ctgagactgctgaacgccctgggctgcctggtg

SEQ ID NO: 922 - DNA, 35 bp, Artificial Sequence
  source: /note="Description of Artificial Sequence: Synthetic primer"
gttcagcagtctcagcagccagctcaggctgtcgc

SEQ ID NO: 923 - DNA, 45 bp, Artificial Sequence
  source: /note="Description of Artificial Sequence: Synthetic primer"
ctgagctggctgctgagactgctgaacgccgccctgggctgcctg

SEQ ID NO: 924 - DNA, 46 bp, Artificial Sequence
  source: /note="Description of Artificial Sequence: Synthetic primer"
tctcagcagccagctcaggctgtcgccgctcttgctgctgggggcc

SEQ ID NO: 925 - DNA, 42 bp, Artificial Sequence
  source: /note="Description of Artificial Sequence: Synthetic primer"
ggcgacagcctgagctggctgacctgtctggtgaagggcttc

SEQ ID NO: 926 - DNA, 40 bp, Artificial Sequence
  source: /note="Description of Artificial Sequence: Synthetic primer"
cagccagctcaggctgtcgcccatctcctcccgggagggg

SEQ ID NO: 927 - DNA, 39 bp, Artificial Sequence
  source: /note="Description of Artificial Sequence: Synthetic primer"
ggcgacagcctgagctggctgacagccgccctgggctgc

SEQ ID NO: 928 - DNA, 37 bp, Artificial Sequence
  source: /note="Description of Artificial Sequence: Synthetic primer"
cagccagctcaggctgtcgccgctgggggccaggggg

SEQ ID NO: 929 - DNA, 49 bp, Artificial Sequence
  source: /note="Description of Artificial Sequence: Synthetic primer"
ctgagctggctgctgagactgctgaacgtgaaggactacttccccgagc

SEQ ID NO: 930 - DNA, 46 bp, Artificial Sequence
  source: /note="Description of Artificial Sequence: Synthetic primer"
tctcagcagccagctcaggctgtcgcccttgctgctgggggccagg

SEQ ID NO: 931 - DNA, 44 bp, Artificial Sequence
  source: /note="Description of Artificial Sequence: Synthetic primer"
ggcgacagcctgagctggctgtgcaacgtgaaccacaagcccag

SEQ ID NO: 932 - DNA, 40 bp, Artificial Sequence
  source: /note="Description of Artificial Sequence: Synthetic primer"
cagccagctcaggctgtcgccgctgctgctgggcactgtc

SEQ ID NO: 933 - DNA, 38 bp, Artificial Sequence
  source: /note="Description of Artificial Sequence: Synthetic primer"
ctgagactgctgaactgcaacgtgaaccacaagcccag

SEQ ID NO: 934 - DNA, 35 bp, Artificial Sequence; identical to SEQ ID NO: 922
  source: /note="Description of Artificial Sequence: Synthetic primer"

SEQ ID NO: 935 - DNA, 49 bp, Artificial Sequence
  source: /note="Description of Artificial Sequence: Synthetic primer"
ctgagctggctgctgagactgctgaacaagcccagcaacaccaaggtgg

SEQ ID NO: 936 - DNA, 46 bp, Artificial Sequence
  source: /note="Description of Artificial Sequence: Synthetic primer"
tctcagcagccagctcaggctgtcgccgctgctgctgggcactgtc

SEQ ID NO: 937 - DNA, 43 bp, Artificial Sequence
  source: /note="Description of Artificial Sequence: Synthetic primer"
ggcgacagcctgagctggctgtccctgacctgtctggtgaagg

SEQ ID NO: 938 - DNA, 37 bp, Artificial Sequence
  source: /note="Description of Artificial Sequence: Synthetic primer"
cagccagctcaggctgtcgccctcccgggaggggggc

SEQ ID NO: 939 - DNA, 46 bp, Artificial Sequence
  source: /note="Description of Artificial Sequence: Synthetic primer"
ggcgacagcctgagctggctgaacaactacaagaccacacctccag

SEQ ID NO: 940 - DNA, 40 bp, Artificial Sequence
  source: /note="Description of Artificial Sequence: Synthetic primer"
cagccagctcaggctgtcgccctcgggctggccgttgctc

SEQ ID NO: 941 - DNA, 44 bp, Artificial Sequence
  source: /note="Description of Artificial Sequence: Synthetic primer"
gcgacagcctgagctggctgcagacctacatctgcaacgtgaac

SEQ ID NO: 942 - DNA, 42 bp, Artificial Sequence
  source: /note="Description of Artificial Sequence: Synthetic primer"
cagccagctcaggctgtcgcccactgtcaccacgctggacag

SEQ ID NO: 943 - DNA, 51 bp, Artificial Sequence
  source: /note="Description of Artificial Sequence: Synthetic primer"
ctgagctggctgctgagactgctgaacaacgtgaaccacaagcccagcaac

SEQ ID NO: 944 - DNA, 48 bp, Artificial Sequence
  source: /note="Description of Artificial Sequence: Synthetic primer"
tctcagcagccagctcaggctgtcgcccactgtcaccacgctggacag

SEQ ID NO: 945 - DNA, 51 bp, Artificial Sequence
  source: /note="Description of Artificial Sequence: Synthetic primer"
ctgagctggctgctgagactgctgaacttcctgtacagcaagctgaccgtg

SEQ ID NO: 946 - DNA, 49 bp, Artificial Sequence
  source: /note="Description of Artificial Sequence: Synthetic primer"
tctcagcagccagctcaggctgtcgcccactggaggtgtggtcttgtag

SEQ ID NO: 947 - DNA, 39 bp, Artificial Sequence
  source: /note="Description of Artificial Sequence: Synthetic primer"
ctgagactgctgaaccagacctacatctgcaacgtgaac

SEQ ID NO: 948 - DNA, 35 bp, Artificial Sequence; identical to SEQ ID NO: 922
  source: /note="Description of Artificial Sequence: Synthetic primer"

SEQ ID NO: 949 - DNA, 50 bp, Artificial Sequence
  source: /note="Description of Artificial Sequence: Synthetic primer"
ctggagttcatcgccagcaagctggcctgcaacgtgaaccacaagcccag

SEQ ID NO: 950 - DNA, 48 bp, Artificial Sequence
  source: /note="Description of Artificial Sequence: Synthetic primer"
cttgctggcgatgaactccaggctgtccactgtcaccacgctggacag

SEQ ID NO: 951 - DNA, 52 bp, Artificial Sequence
  source: /note="Description of Artificial Sequence: Synthetic primer"
ctgagctggctgctgagactgctgaactacatctgcaacgtgaaccacaagc

SEQ ID NO: 952 - DNA, 47 bp, Artificial Sequence; identical to SEQ ID NO: 402
  source: /note="Description of Artificial Sequence: Synthetic primer"

SEQ ID NO: 953 - DNA, 51 bp, Artificial Sequence
  source: /note="Description of Artificial Sequence: Synthetic primer"
ctggagttcatcgccagcaagctggccaacgtgaaccacaagcccagcaac

SEQ ID NO: 954 - DNA, 47 bp, Artificial Sequence; identical to SEQ ID NO: 608
  source: /note="Description of Artificial Sequence: Synthetic primer"

SEQ ID NO: 955 - DNA, 49 bp, Artificial Sequence
  source: /note="Description of Artificial Sequence: Synthetic primer"
agcctgagctggctgctgagactgctgttcagctgcagcgtgatgcacg

SEQ ID NO: 956 - DNA, 49 bp, Artificial Sequence
  source: /note="Description of Artificial Sequence: Synthetic primer"
cagcagtctcagcagccagctcaggctgtccacggtcagcttgctgtac

SEQ ID NO: 957 - DNA, 49 bp, Artificial Sequence
  source: /note="Description of Artificial Sequence: Synthetic primer"
agcctggagttcatcgccagcaagctgttcagctgcagcgtgatgcacg

SEQ ID NO: 958 - DNA, 49 bp, Artificial Sequence
  source: /note="Description of Artificial Sequence: Synthetic primer"
cagcttgctggcgatgaactccaggctgtccacggtcagcttgctgtac

SEQ ID NO: 959 - DNA, 46 bp, Artificial Sequence
  source: /note="Description of Artificial Sequence: Synthetic primer"
gacagcctggagttcatcgccaacaactacaagaccacacctccag

SEQ ID NO: 960 - DNA, 41 bp, Artificial Sequence
  source: /note="Description of Artificial Sequence: Synthetic primer"
ggcgatgaactccaggctgtcccactccacggcgatgtcgc

SEQ ID NO: 961 - DNA, 46 bp, Artificial Sequence
  source: /note="Description of Artificial Sequence: Synthetic primer"
gacagcctgagctggctgctgaacaactacaagaccacacctccag

SEQ ID NO: 962 - DNA, 41 bp, Artificial Sequence
  source: /note="Description of Artificial Sequence: Synthetic primer"
cagcagccagctcaggctgtcccactccacggcgatgtcgc

SEQ ID NO: 963 - DNA, 47 bp, Artificial Sequence
  source: /note="Description of Artificial Sequence: Synthetic primer"
ctgagctggctgctgagactgctgaaccagctggtggagtctggcgg

SEQ ID NO: 964 - DNA, 48 bp, Artificial Sequence
  source: /note="Description of Artificial Sequence: Synthetic primer"
tctcagcagccagctcaggctgtcgccaacctcagcagtggcaccggg

SEQ ID NO: 965 - DNA, 48 bp, Artificial Sequence
  source: /note="Description of Artificial Sequence: Synthetic primer"
ctgagctggctgctgagactgctgaaccagatgacccagtccccgagc

SEQ ID NO: 966 - DNA, 54 bp, Artificial Sequence
  source: /note="Description of Artificial Sequence: Synthetic primer"
ctgagctggctgctgagactgctgaactaatctagacacctcagacaatcaacc

SEQ ID NO: 967 - DNA, 47 bp, Artificial Sequence
  source: /note="Description of Artificial Sequence: Synthetic primer"
tctcagcagccagctcaggctgtcgccgcactcgcccctgttgaagc

SEQ ID NO: 968 - DNA, 47 bp, Artificial Sequence
  source: /note="Description of Artificial Sequence: Synthetic primer"
ctggagttcatcgccagcaagctggcccagatgacccagtccccgag

SEQ ID NO: 969 - DNA, 48 bp, Artificial Sequence
  source: /note="Description of Artificial Sequence: Synthetic primer"
cttgctggcgatgaactccaggctgtcgatatcagcagtggcaccggg

SEQ ID NO: 970 - DNA, 54 bp, Artificial Sequence
  source: /note="Description of Artificial Sequence: Synthetic primer"
ctggagttcatcgccagcaagctggcctaatctagacacctcagacaatcaacc

SEQ ID NO: 971 - DNA, 47 bp, Artificial Sequence
  source: /note="Description of Artificial Sequence: Synthetic primer"
cttgctggcgatgaactccaggctgtcgcactcgcccctgttgaagc

SEQ ID NO: 972 - DNA, 47 bp, Artificial Sequence
  source: /note="Description of Artificial Sequence: Synthetic primer"
ctggagttcatcgccagcaagctggcccagctggtggagtctggcgg

SEQ ID NO: 973 - DNA, 47 bp, Artificial Sequence
  source: /note="Description of Artificial Sequence: Synthetic primer"
cttgctggcgatgaactccaggctgtcaacctcagcagtggcaccgg

SEQ ID NO: 974 - DNA, 54 bp, Artificial Sequence; identical to SEQ ID NO: 966
  source: /note="Description of Artificial Sequence: Synthetic primer"

SEQ ID NO: 975 - DNA, 46 bp, Artificial Sequence
  source: /note="Description of Artificial Sequence: Synthetic primer"
tctcagcagccagctcaggctgtcgcccttgccgggggacaggctc

SEQ ID NO: 976 - DNA, 54 bp, Artificial Sequence; identical to SEQ ID NO: 970
  source: /note="Description of Artificial Sequence: Synthetic primer"

SEQ ID NO: 977 - DNA, 46 bp, Artificial Sequence
  source: /note="Description of Artificial Sequence: Synthetic primer"
cttgctggcgatgaactccaggctgtccttgccgggggacaggctc

SEQ ID NO: 978 - DNA, 48 bp, Artificial Sequence
  source: /note="Description of Artificial Sequence: Synthetic primer"
ctggagttcatcgccagcaagctggccggctgcctggtgaaggactac

SEQ ID NO: 979 - DNA, 43 bp, Artificial Sequence
  source: /note="Description of Artificial Sequence: Synthetic primer"
cttgctggcgatgaactccaggctgtcgctgggggccaggggg

SEQ ID NO: 980 - DNA, 50 bp, Artificial Sequence
  source: /note="Description of Artificial Sequence: Synthetic primer"
agcctggagttcatcgccagcaagctgtgcaacgtgaaccacaagcccag

SEQ ID NO: 981 - DNA, 47 bp, Artificial Sequence; identical to SEQ ID NO: 608
  source: /note="Description of Artificial Sequence: Synthetic primer"

SEQ ID NO: 982 - DNA, 50 bp, Artificial Sequence
  source: /note="Description of Artificial Sequence: Synthetic primer"
gacagcctggagttcatcgccagcaagtgcaacgtgaaccacaagcccag

SEQ ID NO: 983 - DNA, 47 bp, Artificial Sequence; identical to SEQ ID NO: 610
  source: /note="Description of Artificial Sequence: Synthetic primer"

SEQ ID NO: 984 - DNA, 50 bp, Artificial Sequence
  source: /note="Description of Artificial Sequence: Synthetic primer"
ctggagttcatcgccagcaagctggccaagctgaccgtggacaagtccag

SEQ ID NO: 985 - DNA, 49 bp, Artificial Sequence
  source: /note="Description of Artificial Sequence: Synthetic primer"
cttgctggcgatgaactccaggctgtccactggaggtgtggtcttgtag

SEQ ID NO: 986 - DNA, 52 bp, Artificial Sequence
  source: /note="Description of Artificial Sequence: Synthetic primer"
gacagcctggagttcatcgccagcaagaacaactacaagaccacacctccag

SEQ ID NO: 987 - DNA, 46 bp, Artificial Sequence; identical to SEQ ID NO: 726
  source: /note="Description of Artificial Sequence: Synthetic primer"

SEQ ID NO: 988 - DNA, 52 bp, Artificial Sequence
  source: /note="Description of Artificial Sequence: Synthetic primer"
agcctggagttcatcgccagcaagctgaacaactacaagaccacacctccag

SEQ ID NO: 989 - DNA, 46 bp, Artificial Sequence; identical to SEQ ID NO: 726
  source: /note="Description of Artificial Sequence: Synthetic primer"

SEQ ID NO: 990 - DNA, 24 bp, Artificial Sequence
  source: /note="Description of Artificial Sequence: Synthetic primer"
gagaacctgtacttccaaggccac

SEQ ID NO: 991 - DNA, 38 bp, Artificial Sequence
  source: /note="Description of Artificial Sequence: Synthetic primer"
atgtatatctccttcttaaagttaaacaaaattatttc

SEQ ID NO: 992 - DNA, 22 bp, Artificial Sequence
  source: /note="Description of Artificial Sequence: Synthetic primer"
caccaccaccaccaccactgag

SEQ ID NO: 993 - DNA, 45 bp, Artificial Sequence
  source: /note="Description of Artificial Sequence: Synthetic primer"
ttggaagtacaggttctcacgttcgcagaggaatttacacacttc

SEQ ID NO: 994 - DNA, 45 bp, Artificial Sequence
  source: /note="Description of Artificial Sequence: Synthetic primer"
taagaaggagatatacatatgggttttctgccgaaagagaaaaag

SEQ ID NO: 995 - DNA, 50 bp, Artificial Sequence
  source: /note="Description of Artificial Sequence: Synthetic primer"
gtggtggtggtggtggtggctattatttttaatatattcaacgacgtcgc

SEQ ID NO: 996 - DNA, 47 bp, Artificial Sequence
  source: /note="Description of Artificial Sequence: Synthetic primer"
taagaaggagatatacatatgttcgagaaagtccgtaaaatcattgc

SEQ ID NO: 997 - DNA, 42 bp, Artificial Sequence
  source: /note="Description of Artificial Sequence: Synthetic primer"
gtggtggtggtggtggtgcgcctggtggccgttgatgtaatc

SEQ ID NO: 998 - DNA, 45 bp, Artificial Sequence
  source: /note="Description of Artificial Sequence: Synthetic primer"
taagaaggagatatacatatgagcactatcgaagaacgcgttaag

SEQ ID NO: 999 - DNA, 52 bp, Artificial Sequence
  source: /note="Description of Artificial Sequence: Synthetic primer"
ctggacatgctggagtggagcctgatgaacaactacaagaccacacctccag

SEQ ID NO: 1000 - DNA, 46 bp, Artificial Sequence
  source: /note="Description of Artificial Sequence: Synthetic primer"
ccactccagcatgtccaggctgtcgccctcgggctggccgttgctc

SEQ ID NO: 1001 - DNA, 47 bp, Artificial Sequence
  source: /note="Description of Artificial Sequence: Synthetic primer"
ctggacatgctggagtggagcctgatgcagctggtggagtctggcgg

SEQ ID NO: 1002 - DNA, 47 bp, Artificial Sequence
  source: /note="Description of Artificial Sequence: Synthetic primer"
ccactccagcatgtccaggctgtcgccaacctcagcagtggcaccgg

SEQ ID NO: 1003 - DNA, 50 bp, Artificial Sequence
  source: /note="Description of Artificial Sequence: Synthetic primer"
ctgagctggctgctgagactgctgaacaagaaccaggtcagcctgacctg

SEQ ID NO: 1004 - DNA, 47 bp, Artificial Sequence
  source: /note="Description of Artificial Sequence: Synthetic primer"
tctcagcagccagctcaggctgtcgccggtcatctcctcccgggatg

SEQ ID NO: 1005 - DNA, 51 bp, Artificial Sequence
  source: /note="Description of Artificial Sequence: Synthetic primer"
ctgagctggctgctgagactgctgaacaacaactacaagaccacgcctccc

SEQ ID NO: 1006 - DNA, 48 bp, Artificial Sequence
  source: /note="Description of Artificial Sequence: Synthetic primer"
tctcagcagccagctcaggctgtcgccctccggctgcccattgctctc

SEQ ID NO: 1007 - DNA, 50 bp, Artificial Sequence
  source: /note="Description of Artificial Sequence: Synthetic primer"
ctgagctggctgctgagactgctgaacaacagcacctacagggtggtgtc

SEQ ID NO: 1008 - DNA, 48 bp, Artificial Sequence
  source: /note="Description of Artificial Sequence: Synthetic primer"
ctgagctggctgctgagactgctgaacagcacctacagggtggtgtcc

SEQ ID NO: 1009 - DNA, 50 bp, Artificial Sequence
  source: /note="Description of Artificial Sequence: Synthetic primer"
ctggagttcatcgccagcaagctggccaacagcacctacagggtggtgtc

SEQ ID NO: 1010 - DNA, 48 bp, Artificial Sequence
  source: /note="Description of Artificial Sequence: Synthetic primer"
ctggagttcatcgccagcaagctggccagcacctacagggtggtgtcc

SEQ ID NO: 1011 - DNA, 28 bp, Artificial Sequence
  source: /note="Description of Artificial Sequence: Synthetic primer"
gcccgagggcgacgccctgagctggctg

SEQ ID NO: 1012 - DNA, 42 bp, Artificial Sequence
  source: /note="Description of Artificial Sequence: Synthetic primer"
catcaccatcaccatcacgttttccctgccaaacggttctgc

SEQ ID NO: 1013 - DNA, 25 bp, Artificial Sequence
  source: /note="Description of Artificial Sequence: Synthetic primer"
taagtctagagggcccgtttaaacc

SEQ ID NO: 1014 - DNA, 42 bp, Artificial Sequence
  source: /note="Description of Artificial Sequence: Synthetic primer"
ggtgccactgctcagcctgttttccctgccaaacggttctgc

SEQ ID NO: 1015 - DNA, 27 bp, Artificial Sequence
  source: /note="Description of Artificial Sequence: Synthetic primer"
catcaccatcaccatcactaagtctag

SEQ ID NO: 1016 - DNA, 25 bp, Artificial Sequence
  source: /note="Description of Artificial Sequence: Synthetic primer"
atgatagtcggtgtgggtattgatg

SEQ ID NO: 1017 - protein, 4 aa, Artificial Sequence
  source: /note="Description of Artificial Sequence: Synthetic peptide"
AMKM

SEQ ID NO: 1018 - protein, 9 aa, Artificial Sequence
  source: /note="Description of Artificial Sequence: Synthetic peptide"
SSKSTSGGT

SEQ ID NO: 1019 - protein, 9 aa, Artificial Sequence
  source: /note="Description of Artificial Sequence: Synthetic peptide"
CSRSTSEST

SEQ ID NO: 1020 - protein, 9 aa, Artificial Sequence
  source: /note="Description of Artificial Sequence: Synthetic peptide"
CSRSTSGGT

SEQ ID NO: 1021 - protein, 8 aa, Artificial Sequence
  source: /note="Description of Artificial Sequence: Synthetic peptide"
NSGALTSG

SEQ ID NO: 1022 - protein, 9 aa, Artificial Sequence
  source: /note="Description of Artificial Sequence: Synthetic peptide"
PSSSLGTQT

SEQ ID NO: 1023 - protein, 9 aa, Artificial Sequence
  source: /note="Description of Artificial Sequence: Synthetic peptide"
PSSNFGTQT

SEQ ID NO: 1024 - protein, 9 aa, Artificial Sequence
  source: /note="Description of Artificial Sequence: Synthetic peptide"
PSSSLGTKT

SEQ ID NO: 1025 - protein, 4 aa, Artificial Sequence
  source: /note="Description of Artificial Sequence: Synthetic peptide"
KPSN

SEQ ID NO: 1026 - protein, 8 aa, Artificial Sequence
  source: /note="Description of Artificial Sequence: Synthetic peptide"
PAPELLGG

SEQ ID NO: 1027 - protein, 7 aa, Artificial Sequence
  source: /note="Description of Artificial Sequence: Synthetic peptide"
PAPPVAG

SEQ ID NO: 1028 - protein, 8 aa, Artificial Sequence
  source: /note="Description of Artificial Sequence: Synthetic peptide"
PAPEFLGG

SEQ ID NO: 1029 - protein, 6 aa, Artificial Sequence
  source: /note="Description of Artificial Sequence: Synthetic peptide"
ISRTPE

SEQ ID NO: 1030 - protein, 6 aa, Artificial Sequence
  source: /note="Description of Artificial Sequence: Synthetic peptide"
SHEDPE

SEQ ID NO: 1031 - protein, 6 aa, Artificial Sequence
  source: /note="Description of Artificial Sequence: Synthetic peptide"
SQEDPE

SEQ ID NO: 1032 - protein, 5 aa, Artificial Sequence
  source: /note="Description of Artificial Sequence: Synthetic peptide"
QYNST

SEQ ID NO: 1033 - protein, 5 aa, Artificial Sequence
  source: /note="Description of Artificial Sequence: Synthetic peptide"
QFNST

SEQ ID NO: 1034 - protein, 5 aa, Artificial Sequence
  source: /note="Description of Artificial Sequence: Synthetic peptide"
TVLHQ

SEQ ID NO: 1035 - protein, 5 aa, Artificial Sequence
  source: /note="Description of Artificial Sequence: Synthetic peptide"
TVVHQ

SEQ ID NO: 1036 - protein, 4 aa, Artificial Sequence
  source: /note="Description of Artificial Sequence: Synthetic peptide"
NGKE

SEQ ID NO: 1037 - protein, 6 aa, Artificial Sequence
  source: /note="Description of Artificial Sequence: Synthetic peptide"
KALPAP

SEQ ID NO: 1038 - protein, 6 aa, Artificial Sequence
  source: /note="Description of Artificial Sequence: Synthetic peptide"
KGLPAP

SEQ ID NO: 1039 - protein, 6 aa, Artificial Sequence
  source: /note="Description of Artificial Sequence: Synthetic peptide"
KGLPSS

SEQ ID NO: 1040 - protein, 7 aa, Artificial Sequence
  source: /note="Description of Artificial Sequence: Synthetic peptide"
AKGQPRE

SEQ ID NO: 1041 - protein, 7 aa, Artificial Sequence
  source: /note="Description of Artificial Sequence: Synthetic peptide"
TKGQPRE

SEQ ID NO: 1042 - protein, 7 aa, Artificial Sequence
  source: /note="Description of Artificial Sequence: Synthetic peptide"
  VARIANT (2)..(2): /replace="Glu"
  VARIANT (4)..(4): /replace="Met"
  misc_feature (1)..(7): /note="Variant residues given in the sequence have no preference with respect to those in the annotations for variant positions"
RDELTKN

SEQ ID NO: 1043 - protein, 7 aa, Artificial Sequence
  source: /note="Description of Artificial Sequence: Synthetic peptide"
REEMTKN

SEQ ID NO: 1044 - protein, 7 aa, Artificial Sequence
  source: /note="Description of Artificial Sequence: Synthetic peptide"
QEEMTKN

SEQ ID NO: 1045 - protein, 4 aa, Artificial Sequence
  source: /note="Description of Artificial Sequence: Synthetic peptide"
DSDG

SEQ ID NO: 1046 - protein, 8 aa, Artificial Sequence
  source: /note="Description of Artificial Sequence: Synthetic peptide"
SRWQQGNV

SEQ ID NO: 1047 - protein, 8 aa, Artificial Sequence
  source: /note="Description of Artificial Sequence: Synthetic peptide"
SRWQQGNI

SEQ ID NO: 1048 - protein, 8 aa, Artificial Sequence
  source: /note="Description of Artificial Sequence: Synthetic peptide"
SRWQEGNV

SEQ ID NO: 1049 - protein, 5 aa, Artificial Sequence
  source: /note="Description of Artificial Sequence: Synthetic peptide"
SLSPG

SEQ ID NO: 1050 - protein, 5 aa, Artificial Sequence
  source: /note="Description of Artificial Sequence: Synthetic peptide"
SLSLG

SEQ ID NO: 1051 - protein, 4 aa, Artificial Sequence
  source: /note="Description of Artificial Sequence: Synthetic peptide"
TVAA

SEQ ID NO: 1052 - protein, 5 aa, Artificial Sequence
  source: /note="Description of Artificial Sequence: Synthetic peptide"
PPSDE

SEQ ID NO: 1053 - protein, 5 aa, Artificial Sequence
  source: /note="Description of Artificial Sequence: Synthetic peptide"
YPREA

SEQ ID NO: 1054 - protein, 6 aa, Artificial Sequence
  source: /note="Description of Artificial Sequence: Synthetic peptide"
DNALQS

SEQ ID NO: 1055 - protein, 8 aa, Artificial Sequence
  source: /note="Description of Artificial Sequence: Synthetic peptide"
ESVTEQDS

SEQ ID NO: 1056 - protein, 8 aa, Artificial Sequence
  source: /note="Description of Artificial Sequence: Synthetic peptide"
THQGLSSP

SEQ ID NO: 1057 - protein, 5 aa, Artificial Sequence
  source: /note="Description of Artificial Sequence: Synthetic peptide"
  MOD_RES (3)..(3): Any amino acid
LPXTG

SEQ ID NO: 1058 - protein, 5 aa, Artificial Sequence
  source: /note="Description of Artificial Sequence: Synthetic peptide"
  MOD_RES (2)..(2): Any amino acid
  MOD_RES (4)..(4): Any amino acid
CXPXR

SEQ ID NO: 1059 - protein, 9 aa, Artificial Sequence
  source: /note="Description of Artificial Sequence: Synthetic peptide"
  MOD_RES (2)..(2): Any amino acid
  MOD_RES (5)..(6): Any amino acid
DXFFXXLGG

SEQ ID NO: 1060 - protein, 4 aa, Artificial Sequence
  source: /note="Description of Artificial Sequence: Synthetic peptide"
RLLN

SEQ ID NO: 1061 - DNA, 46 bp, Artificial Sequence
  source: /note="Description of Artificial Sequence: Synthetic primer"
ctgagctggctgctgagactgctgaacagcaccaagggccccagcg

SEQ ID NO: 1062 - DNA, 48 bp, Artificial Sequence
  source: /note="Description of Artificial Sequence: Synthetic primer"
tctcagcagccagctcaggctgtcgccagccgaggagacggtgaccag

SEQ ID NO: 1063 - DNA, 48 bp, Artificial Sequence
  source: /note="Description of Artificial Sequence: Synthetic primer"
ctgagctggctgctgagactgctgaacaccaagggccccagcgtgttc

SEQ ID NO: 1064 - DNA, 48 bp, Artificial Sequence
  source: /note="Description of Artificial Sequence: Synthetic primer"
tctcagcagccagctcaggctgtcgccgctagccgaggagacggtgac

SEQ ID NO: 1065 - DNA, 47 bp, Artificial Sequence
  source: /note="Description of Artificial Sequence: Synthetic primer"
ctgagctggctgctgagactgctgaacaagggccccagcgtgttccc

SEQ ID NO: 1066 - DNA, 47 bp, Artificial Sequence
  source: /note="Description of Artificial Sequence: Synthetic primer"
tctcagcagccagctcaggctgtcgccggtgctagccgaggagacgg

SEQ ID NO: 1067 - DNA, 47 bp, Artificial Sequence
  source: /note="Description of Artificial Sequence: Synthetic primer"
ctgagctggctgctgagactgctgaacagcaagagcaccagcggcgg

SEQ ID NO: 1068 - DNA, 46 bp, Artificial Sequence
  source: /note="Description of Artificial Sequence: Synthetic primer"
tctcagcagccagctcaggctgtcgccgctgggggccagggggaac

SEQ ID NO: 1069 - DNA, 47 bp, Artificial Sequence
  source: /note="Description of Artificial Sequence: Synthetic primer"
ctgagctggctgctgagactgctgaacaagagcaccagcggcggcac

SEQ ID NO: 1070 - DNA, 45 bp, Artificial Sequence
  source: /note="Description of Artificial Sequence: Synthetic primer"
tctcagcagccagctcaggctgtcgccgctgctgggggccagggg

SEQ ID NO: 1071 - DNA, 46 bp, Artificial Sequence
  source: /note="Description of Artificial Sequence: Synthetic primer"
ctgagctggctgctgagactgctgaacagcaccagcggcggcacag

SEQ ID NO: 1072 - DNA, 46 bp, Artificial Sequence; identical to SEQ ID NO: 930
  source: /note="Description of Artificial Sequence: Synthetic primer"

SEQ ID NO: 1073 - DNA, 45 bp, Artificial Sequence
  source: /note="Description of Artificial Sequence: Synthetic primer"
ctgagctggctgctgagactgctgaacaccagcggcggcacagcc

SEQ ID NO: 1074 - DNA, 46 bp, Artificial Sequence; identical to SEQ ID NO: 924
  source: /note="Description of Artificial Sequence: Synthetic primer"

SEQ ID NO: 1075 - DNA, 45 bp, Artificial Sequence
  source: /note="Description of Artificial Sequence: Synthetic primer"
ctgagctggctgctgagactgctgaacagcggcggcacagccgcc

SEQ ID NO: 1076 - DNA, 47 bp, Artificial Sequence
  source: /note="Description of Artificial Sequence: Synthetic primer"
tctcagcagccagctcaggctgtcgccggtgctcttgctgctggggg

SEQ ID NO: 1077 - DNA, 45 bp, Artificial Sequence
  source: /note="Description of Artificial Sequence: Synthetic primer"
ctgagctggctgctgagactgctgaacggcggcacagccgccctg

SEQ ID NO: 1078 - DNA, 48 bp, Artificial Sequence
  source: /note="Description of Artificial Sequence: Synthetic primer"
tctcagcagccagctcaggctgtcgccgctggtgctcttgctgctggg

SEQ ID NO: 1079 - DNA, 45 bp, Artificial Sequence
  source: /note="Description of Artificial Sequence: Synthetic primer"
ctgagctggctgctgagactgctgaacggcacagccgccctgggc

SEQ ID NO: 1080 - DNA, 47 bp, Artificial Sequence
  source: /note="Description of Artificial Sequence: Synthetic primer"
tctcagcagccagctcaggctgtcgccgccgctggtgctcttgctgc

SEQ ID NO: 1081 - DNA, 45 bp, Artificial Sequence; identical to SEQ ID NO: 917
  source: /note="Description of Artificial Sequence: Synthetic primer"

SEQ ID NO: 1082 - DNA, 46 bp, Artificial Sequence
  source: /note="Description of Artificial Sequence: Synthetic primer"
tctcagcagccagctcaggctgtcgccgccgccgctggtgctcttg

SEQ ID NO: 1083 - DNA, 48 bp, Artificial Sequence
  source: /note="Description of Artificial Sequence: Synthetic primer"
ctgagctggctgctgagactgctgaaccccgtgaccgtgtcctggaac

SEQ ID NO: 1084 - DNA, 49 bp, Artificial Sequence
  source: /note="Description of Artificial Sequence: Synthetic primer"
tctcagcagccagctcaggctgtcgccctcggggaagtagtccttcacc

SEQ ID NO: 1085 - DNA, 49 bp, Artificial Sequence
  source: /note="Description of Artificial Sequence: Synthetic primer"
ctgagctggctgctgagactgctgaacgtgaccgtgtcctggaacagcg

SEQ ID NO: 1086 - DNA, 49 bp, Artificial Sequence
  source: /note="Description of Artificial Sequence: Synthetic primer"
tctcagcagccagctcaggctgtcgccgggctcggggaagtagtccttc

SEQ ID NO: 1087 - DNA, 46 bp, Artificial Sequence
  source: /note="Description of Artificial Sequence: Synthetic primer"
ctgagctggctgctgagactgctgaacagcggagccctgacctccg

SEQ ID NO: 1088 - DNA, 48 bp, Artificial Sequence
  source: /note="Description of Artificial Sequence: Synthetic primer"
tctcagcagccagctcaggctgtcgccgttccaggacacggtcacggg

SEQ ID NO: 1089 - DNA, 51 bp, Artificial Sequence
  source: /note="Description of Artificial Sequence: Synthetic primer"
ctgagctggctgctgagactgctgaacggagccctgacctccggcgtgcac

SEQ ID NO: 1090 - DNA, 49 bp, Artificial Sequence
  source: /note="Description of Artificial Sequence: Synthetic primer"
tctcagcagccagctcaggctgtcgccgctgttccaggacacggtcacg

SEQ ID NO: 1091 - DNA, 45 bp, Artificial Sequence
  source: /note="Description of Artificial Sequence: Synthetic primer"
ctgagctggctgctgagactgctgaacgccctgacctccggcgtg

SEQ ID NO: 1092 - DNA, 47 bp, Artificial Sequence
  source: /note="Description of Artificial Sequence: Synthetic primer"
tctcagcagccagctcaggctgtcgcctccgctgttccaggacacgg

SEQ ID NO: 1093 - DNA, 47 bp, Artificial Sequence
  source: /note="Description of Artificial Sequence: Synthetic primer"
ctgagctggctgctgagactgctgaacctgacctccggcgtgcacac

SEQ ID NO: 1094 - DNA, 48 bp, Artificial Sequence
  source: /note="Description of Artificial Sequence: Synthetic primer"
tctcagcagccagctcaggctgtcgccggctccgctgttccaggacac

SEQ ID NO: 1095 - DNA, 48 bp, Artificial Sequence
  source: /note="Description of Artificial Sequence: Synthetic primer"
tctcagcagccagctcaggctgtcgccgatatcagcagtggcaccggg

SEQ ID NO: 1096 - DNA, 49 bp, Artificial Sequence
  source: /note="Description of Artificial Sequence: Synthetic primer"
tctcagcagccagctcaggctgtcgccgtactgctcctctctgggcttg

SEQ ID NO: 1097 - DNA, 49 bp, Artificial Sequence
  source: /note="Description of Artificial Sequence: Synthetic primer"
tctcagcagccagctcaggctgtcgccgttgtactgctcctctctgggc

SEQ ID NO: 1098 - DNA, 49 bp, Artificial Sequence
  source: /note="Description of Artificial Sequence: Synthetic primer"
cttgctggcgatgaactccaggctgtcgtactgctcctctctgggcttg

SEQ ID NO: 1099 - DNA, 49 bp, Artificial Sequence
  source: /note="Description of Artificial Sequence: Synthetic primer"
cttgctggcgatgaactccaggctgtcgttgtactgctcctctctgggc

SEQ ID NO: 1100 - DNA, 28 bp, Artificial Sequence
  source: /note="Description of Artificial Sequence: Synthetic primer"
cagccagctcagggcgtcgccctcgggc

SEQ ID NO: 1101 - DNA, 48 bp, Artificial Sequence
  source: /note="Description of Artificial Sequence: Synthetic primer"
acgggccctctagacttatgactttgtaccatttcgtattggaatttc

SEQ ID NO: 1102 - DNA, 38 bp, Artificial Sequence
  source: /note="Description of Artificial Sequence: Synthetic primer"
gtgatggtgatggtgatgaggctgagcagtggcaccgg

SEQ ID NO: 1103 - DNA, 48 bp, Artificial Sequence
  source: /note="Description of Artificial Sequence: Synthetic primer"
gtgatggtgatggtgatgtgactttgtaccatttcgtattggaatttc

SEQ ID NO: 1104 - DNA, 20 bp, Artificial Sequence
  source: /note="Description of Artificial Sequence: Synthetic primer"
aggctgagcagtggcaccgg

SEQ ID NO: 1105 - DNA, 24 bp, Artificial Sequence
  source: /note="Description of Artificial Sequence: Synthetic primer"
ttactctccgatgaggatgttacc

SEQ ID NO: 1106 - protein, 6 aa, Artificial Sequence
  source: /note="Description of Artificial Sequence: Synthetic 6xHis tag"
HHHHHH

SEQ ID NO: 1107 - protein, 340 aa, Artificial Sequence; identical to SEQ ID NO: 127
  source: /note="Description of Artificial Sequence: Synthetic anti-hHER2-HC-E388-GDS-ppan-MC-ValCit-PABC-MMAF- LSWLLRLLN-N389 polypeptide"
  MOD_RES (273)..(273): Ser at this position is modified with ppan-MC-ValCit-PABC-MMAF

SEQ ID NO: 1108 - protein, 340 aa, Artificial Sequence; identical to SEQ ID NO: 121
  source: /note="Description of Artificial Sequence: Synthetic anti-hHER2-HC-T359-GDS-ppan-MC-ValCit-PABC-MMAF- LSWLLRLLN-K360 polypeptide"
  MOD_RES (244)..(244): Ser at this position is modified with ppan-MC-ValCit-PABC-MMAF

SEQ ID NO: 1109 - protein, 328 aa, Artificial Sequence
  source: /note="Description of Artificial Sequence: Synthetic polypeptide"
STKGPSVFPLAPSSKSTSGGTAALGCLVKDYFPEPVTVSWNSGALTSGVHTFPAVLQSSGLYSLSSVVTVPSSSLGTQTYICNVNHKPSNTKVDKKVEPKSCDKTHTCPPCPAPELLGGPSVFLFPPKPKDTLMISRTPEVTCVVVDVSHEDPEVKFNWYVDGVEVHNAKTKPREEQYNSTYRVVSVLTVLHQDWLNGKEYKCKVSNKALPAPIEKTISKAKGQPREPQVYTLPPSREEMTKNQVSLTCLVKGFYPSDIAVEWESNGQPENNYKTTPPVLDSDGSFFLYSKLTVDKSRWQQGNVFSCSVMHEALHNHYTQKSLSLSPG

SEQ ID NO: 1110 - protein, 328 aa, Homo sapiens
STKGPSVFPLAPSSKSTSGGTAALGCLVKDYFPEPVTVSWNSGALTSGVHTFPAVLQSSGLYSLSSVVTVPSSSLGTQTYICNVNHKPSNTKVDKKVEPKSCDKTHTCPPCPAPELLGGPSVFLFPPKPKDTLMISRTPEVTCVVVDVSHEDPEVKFNWYVDGVEVHNAKTKPREEQYNSTYRVVSVLTVLHQDWLNGKEYKCKVSNKALPAPIEKTISKAKGQPREPQVYTLPPSRDELTKNQVSLTCLVKGFYPSDIAVEWESNGQPENNYKTTPPVLDSDGSFFLYSKLTVDKSRWQQGNVFSCSVMHEALHNHYTQKSLSLSPG

SEQ ID NO: 1111 - protein, 324 aa, Homo sapiens
STKGPSVFPLAPCSRSTSESTAALGCLVKDYFPEPVTVSWNSGALTSGVHTFPAVLQSSGLYSLSSVVTVPSSNFGTQTYTCNVDHKPSNTKVDKTVERKCCVECPPCPAPPVAGPSVFLFPPKPKDTLMISRTPEVTCVVVDVSHEDPEVQFNWYVDGVEVHNAKTKPREEQFNSTFRVVSVLTVVHQDWLNGKEYKCKVSNKGLPAPIEKTISKTKGQPREPQVYTLPPSREEMTKNQVSLTCLVKGFYPSDISVEWESNGQPENNYKTTPPMLDSDGSFFLYSKLTVDKSRWQQGNVFSCSVMHEALHNHYTQKSLSLSPG

SEQ ID NO: 1112 - protein, 375 aa, Homo sapiens
STKGPSVFPLAPCSRSTSGGTAALGCLVKDYFPEPVTVSWNSGALTSGVHTFPAVLQSSGLYSLSSVVTVPSSSLGTQTYTCNVNHKPSNTKVDKRVELKTPLGDTTHTCPRCPEPKSCDTPPPCPRCPEPKSCDTPPPCPRCPEPKSCDTPPPCPRCPAPELLGGPSVFLFPPKPKDTLMISRTPEVTCVVVDVSHEDPEVQFKWYVDGVEVHNAKTKPREEQYNSTFRVVSVLTVLHQDWLNGKEYKCKVSNKALPAPIEKTISKTKGQPREPQVYTLPPSREEMTKNQVSLTCLVKGFYPSDIAVEWESSGQPENNYNTTPPMLDSDGSFFLYSKLTVDKSRWQQGNIFSCSVMHEALHNRFTQKSLSLSPG

SEQ ID NO: 1113 - protein, 325 aa, Homo sapiens
STKGPSVFPLAPCSRSTSESTAALGCLVKDYFPEPVTVSWNSGALTSGVHTFPAVLQSSGLYSLSSVVTVPSSSLGTKTYTCNVDHKPSNTKVDKRVESKYGPPCPSCPAPEFLGGPSVFLFPPKPKDTLMISRTPEVTCVVVDVSQEDPEVQFNWYVDGVEVHNAKTKPREEQFNSTYRVVSVLTVLHQDWLNGKEYKCKVSNKGLPSSIEKTISKAKGQPREPQVYTLPPSQEEMTKNQVSLTCLVKGFYPSDIAVEWESNGQPENNYKTTPPVLDSDGSFFLYSRLTVDKSRWQEGNVFSCSVMHEALHNHYTQKSLSLSLG

SEQ ID NO: 1114 - protein, 106 aa, Artificial Sequence
  source: /note="Description of Artificial Sequence: Synthetic polypeptide"
TVAAPSVFIFPPSDEQLKSGTASVVCLLNNFYPREAKVQWKVDNALQSGNSQESVTEQDSKDSTYSLSSTLTLSKADYEKHKVYACEVTHQGLSSPVTKSFNRGEC

SEQ ID NO: 1115 - protein, 106 aa, Homo sapiens; identical to SEQ ID NO: 1114

SEQ ID NO: 1116 - protein, 8 aa, Artificial Sequence
  source: /note="Description of Artificial Sequence: Synthetic peptide"
DSLEFIAS

SEQ ID NO: 1117 - protein, 340 aa, Artificial Sequence; identical to SEQ ID NO: 121
  source: /note="Description of Artificial Sequence: Synthetic anti-hHER2-HC-T359-GDS-ppan-MC-MMAF-LSWLLRLLN-K360 polypeptide"
  MOD_RES (244)..(244): Ser at this position is modified with ppan-MC-MMAF

SEQ ID NO: 1118 - protein, 340 aa, Artificial Sequence; identical to SEQ ID NO: 127
  source: /note="Description of Artificial Sequence: Synthetic anti-hHER2-HC-E388-GDS-ppan-MC-MMAF-LSWLLRLLN-N389 polypeptide"
  MOD_RES (273)..(273): Ser at this position is modified with ppan-MC-MMAF

SEQ ID NO: 1119 - protein, 460 aa, Artificial Sequence; identical to SEQ ID NO: 95
  source: /note="Description of Artificial Sequence: Synthetic anti-hHER2-HC-V2-DS-ppan-MC-MMAF-LEFIASKLA-Q3 polypeptide"
  MOD_RES (4)..(4): Ser at this position is modified with ppan-MC-MMAF

SEQ ID NO: 1120 - protein, 461 aa, Artificial Sequence; identical to SEQ ID NO: 94
  source: /note="Description of Artificial Sequence: Synthetic anti-hHER2-HC-V2-GDS-ppan-MC-MMAF-LSWLLRLLN-Q3 polypeptide"
  MOD_RES (5)..(5): Ser at this position is modified with ppan-MC-MMAF

SEQ ID NO: 1121 - protein, 338 aa, Artificial Sequence; identical to SEQ ID NO: 130
  source: /note="Description of Artificial Sequence: Synthetic anti-hHER2-HC-E388-DS-ppan-MC-MMAF-LEFIASKL-N389 polypeptide"
  MOD_RES (272)..(272): Ser at this position is modified with ppan-MC-MMAF

SEQ ID NO: 1122 - protein, 339 aa, Artificial Sequence; identical to SEQ ID NO: 129
  source: /note="Description of Artificial Sequence: Synthetic anti-hHER2-HC-E388-DS-ppan-MC-MMAF-LEFIASKLA-N389 polypeptide"
  MOD_RES (272)..(272): Ser at this position is modified with ppan-MC-MMAF

SEQ ID NO: 1123 - protein, 340 aa, Artificial Sequence; identical to SEQ ID NO: 148
  source: /note="Description of Artificial Sequence: Synthetic mAb2-HC-T359-GDS-ppan-MC-MMAF-LSWLLRLLN-K360 polypeptide"
  MOD_RES (244)..(244): Ser at this position is modified with ppan-MC-MMAF

SEQ ID NO: 1124 - protein, 225 aa, Artificial Sequence; identical to SEQ ID NO: 27
  source: /note="Description of Artificial Sequence: Synthetic anti-hHER2-LC-I2-DS-ppan-MC-MMAF-LEFIASKLA-Q3 polypeptide"
  MOD_RES (4)..(4): Ser at this position is modified with ppan-MC-MMAF

SEQ ID NO: 1125 - protein, 457 aa, Artificial Sequence; identical to SEQ ID NO: 99
  source: /note="Description of Artificial Sequence: Synthetic anti-hHER2-HC-S63-ppan-MC-MMAF-V64L-EFIASKLA-K65 polypeptide"
  MOD_RES (63)..(63): Ser at this position is modified with ppan-MC-MMAF

SEQ ID NO: 1126 - protein, 222 aa, Artificial Sequence; identical to SEQ ID NO: 30
  source: /note="Description of Artificial Sequence: Synthetic anti-hHER2-LC-S76D-S77-ppan-MC-MMAF-L78-EFIASKLA-Q79 polypeptide"
  MOD_RES (77)..(77): Ser at this position is modified with ppan-MC-MMAF

SEQ ID NO: 1127 - protein, 328 aa, Artificial Sequence; identical to SEQ ID NO: 109
  source: /note="Description of Artificial Sequence: Synthetic anti-hHER2-HC-P189G-S190D-S191-ppan-maleimidoethylamido- TMR-S192L-L193S-G194W-T195L polypeptide"
  MOD_RES (73)..(73): Ser at this position is modified with ppan-maleimidoethylamido-TMR

SEQ ID NO: 1128 - protein, 340 aa, Artificial Sequence; identical to SEQ ID NO: 121
  source: /note="Description of Artificial Sequence: Synthetic anti-hHER2-HC-T359-GDS-ppan-maleimidoethylamido-TMR- LSWLLRLLN-K360 polypeptide"
  MOD_RES (244)..(244): Ser at this position is modified with ppan-maleimidoethylamido-TMR

SEQ ID NO: 1129 - protein, 340 aa, Artificial Sequence; identical to SEQ ID NO: 127
  source: /note="Description of Artificial Sequence: Synthetic anti-hHER2-HC-E388-GDS-MC-MMAF-LSWLLRLLN-N389 polypeptide"
  MOD_RES (273)..(273): Ser at this position is modified with MC-MMAF

SEQ ID NO: 1130 - protein, 449 aa, Artificial Sequence
  source: /note="Description of Artificial Sequence: Synthetic anti-hHER2-HC polypeptide"
EVQLVESGGGLVQPGGSLRLSCAASGFNIKDTYIHWVRQAPGKGLEWVARIYPTNGYTRYADSVKGRFTISADTSKNTAYLQMNSLRAEDTAVYYCSRWGGDGFYAMDYWGQGTLVTVSSASTKGPSVFPLAPSSKSTSGGTAALGCLVKDYFPEPVTVSWNSGALTSGVHTFPAVLQSSGLYSLSSVVTVPSSSLGTQTYICNVNHKPSNTKVDKKVEPKSCDKTHTCPPCPAPELLGGPSVFLFPPKPKDTLMISRTPEVTCVVVDVSHEDPEVKFNWYVDGVEVHNAKTKPREEQYNSTYRVVSVLTVLHQDWLNGKEYKCKVSNKALPAPIEKTISKAKGQPREPQVYTLPPSREEMTKNQVSLTCLVKGFYPSDIAVEWESNGQPENNYKTTPPVLDSDGSFFLYSKLTVDKSRWQQGNVFSCSVMHEALHNHYTQKSLSLSPG

SEQ ID NO: 1131 - protein, 214 aa, Artificial Sequence
  source: /note="Description of Artificial Sequence: Synthetic anti-hHER2-LC polypeptide"
DIQMTQSPSSLSASVGDRVTITCRASQDVNTAVAWYQQKPGKAPKLLIYSASFLYSGVPSRFSGSRSGTDFTLTISSLQPEDFATYYCQQHYTTPPTFGQGTKVEIKRTVAAPSVFIFPPSDEQLKSGTASVVCLLNNFYPREAKVQWKVDNALQSGNSQESVTEQDSKDSTYSLSSTLTLSKADYEKHKVYACEVTHQGLSSPVTKSFNRGEC

SEQ ID NO: 1132 - protein, 10 aa, Artificial Sequence
  source: /note="Description of Artificial Sequence: Synthetic peptide"
DSLDMLEWSL

SEQ ID NO: 1133 - protein, 157 aa, Escherichia coli
  source: /note="AcpS enzyme with N-terminal signal peptide and C-terminal His6-tag"
MKTFILLLWVLLLWVIFLLPGATAQPAILGLGTDIVEIARIEAVIARSGDRLARRVLSDNEWAIWKTHHQPVRFLAKRFAVKEAAAKAFGTGIRNGLAFNQFEVFNDELGKPRLRLWGEALKLAEKLGVANMHVTLADERHYACATVIIESHHHHHH

SEQ ID NO: 1134 - protein, 340 aa, Homo sapiens
  source: /note="Human PPTase with N-terminal signal peptide and C-terminal His6-tag"
MKTFILLLWVLLLWVIFLLPGATAQPVFPAKRFCLVPSMEGVRWAFSCGTWLPSRAEWLLAVRSIQPEEKERIGQFVFARDAKAAMAGRLMIRKLVAEKLNIPWNHIRLQRTAKGKPVLAKDSSNPYPNFNFNISHQGDYAVLAAEPELQVGIDIMKTSFPGRGSIPEFFHIMKRKFTNKEWETIRSFKDEWTQLDMFYRNWALKESFIKAIGVGLGFELQRLEFDLSPLNLDIGQVYKETRLFLDGEEEKEWAFEESKIDEHHFVAVALRKPDGSRHQDVPSQDDSKPTQRQFTILNFNDLMSSAVPMTPEDPSFWDCFCFTEEIPIRNGTKSHHHHHH

SEQ ID NO: 1135 - protein, 340 aa, Homo sapiens
  source: /note="Human PPTase with N-terminal signal peptide and N-terminal His6-tag"
MKTFILLLWVLLLWVIFLLPGATAQPHHHHHHVFPAKRFCLVPSMEGVRWAFSCGTWLPSRAEWLLAVRSIQPEEKERIGQFVFARDAKAAMAGRLMIRKLVAEKLNIPWNHIRLQRTAKGKPVLAKDSSNPYPNFNFNISHQGDYAVLAAEPELQVGIDIMKTSFPGRGSIPEFFHIMKRKFTNKEWETIRSFKDEWTQLDMFYRNWALKESFIKAIGVGLGFELQRLEFDLSPLNLDIGQVYKETRLFLDGEEEKEWAFEESKIDEHHFVAVALRKPDGSRHQDVPSQDDSKPTQRQFTILNFNDLMSSAVPMTPEDPSFWDCFCFTEEIPIRNGTKS

SEQ ID NO: 1136 - protein, 340 aa, Artificial Sequence; identical to SEQ ID NO: 150
  source: /note="Description of Artificial Sequence: Synthetic anti-hHER2-HC-A118-GDS-ppan-MC-MMAF-LSWLLRLLN-S119 polypeptide"
  MOD_RES (3)..(3): Ser at this position is modified with ppan-MC-MMAF

SEQ ID NO: 1137 - protein, 340 aa, Artificial Sequence; identical to SEQ ID NO: 151
  source: /note="Description of Artificial Sequence: Synthetic anti-hHER2-HC-S119-GDS-ppan-MC-MMAF-LSWLLRLLN-T120 polypeptide"
  MOD_RES (4)..(4): Ser at this position is modified with ppan-MC-MMAF

SEQ ID NO: 1138 - protein, 340 aa, Artificial Sequence; identical to SEQ ID NO: 152
  source: /note="Description of Artificial Sequence: Synthetic anti-hHER2-HC-T120-GDS-ppan-MC-MMAF-LSWLLRLLN-K121 polypeptide"
  MOD_RES (5)..(5): Ser at this position is modified with ppan-MC-MMAF

SEQ ID NO: 1139 - protein, 340 aa, Artificial Sequence; identical to SEQ ID NO: 157
  source: /note="Description of Artificial Sequence: Synthetic anti-hHER2-HC-T135-GDS-ppan-MC-MMAF-LSWLLRLLN-S136 polypeptide"
  MOD_RES (20)..(20): Ser at this position is modified with ppan-MC-MMAF

SEQ ID NO: 1140 - protein, 340 aa, Artificial Sequence; identical to SEQ ID NO: 158
  source: /note="Description of Artificial Sequence: Synthetic anti-hHER2-HC-S136-GDS-ppan-MC-MMAF-LSWLLRLLN-G137 polypeptide"
  MOD_RES (21)..(21): Ser at this position is modified with ppan-MC-MMAF

SEQ ID NO: 1141 - protein, 340 aa, Artificial Sequence; identical to SEQ ID NO: 160
  source: /note="Description of Artificial Sequence: Synthetic anti-hHER2-HC-G138-GDS-ppan-MC-MMAF-LSWLLRLLN-T139 polypeptide"
  MOD_RES (23)..(23): Ser at this position is modified with ppan-MC-MMAF

SEQ ID NO: 1142 - protein, 340 aa, Artificial Sequence; identical to SEQ ID NO: 161
  source: /note="Description of Artificial Sequence: Synthetic anti-hHER2-HC-E152-GDS-ppan-MC-MMAF-LSWLLRLLN-P153 polypeptide"
  MOD_RES (37)..(37): Ser at this position is modified with ppan-MC-MMAF

SEQ ID NO: 1143 - protein, 340 aa, Artificial Sequence; identical to SEQ ID NO: 162
  source: /note="Description of Artificial Sequence: Synthetic anti-hHER2-HC-P153-GDS-ppan-MC-MMAF-LSWLLRLLN-V154 polypeptide"
  MOD_RES (38)..(38): Ser at this position is modified with ppan-MC-MMAF

SEQ ID NO: 1144 - protein, 340 aa, Artificial Sequence; identical to SEQ ID NO: 163
  source: /note="Description of Artificial Sequence: Synthetic anti-hHER2-HC-N159-GDS-ppan-MC-MMAF-LSWLLRLLN-S160 polypeptide"
  MOD_RES (44)..(44): Ser at this position is modified with ppan-MC-MMAF

SEQ ID NO: 1145 - protein, 340 aa, Artificial Sequence; identical to SEQ ID NO: 164
  source: /note="Description of Artificial Sequence: Synthetic anti-hHER2-HC-S160-GDS-ppan-MC-MMAF-LSWLLRLLN-G161 polypeptide"
  MOD_RES (45)..(45): Ser at this position is modified with ppan-MC-MMAF

SEQ ID NO: 1146 - protein, 340 aa, Artificial Sequence; identical to SEQ ID NO: 165
  source: /note="Description of Artificial Sequence: Synthetic anti-hHER2-HC-G161-GDS-ppan-MC-MMAF-LSWLLRLLN-A162 polypeptide"
  MOD_RES (46)..(46): Ser at this position is modified with ppan-MC-MMAF

SEQ ID NO: 1147 - protein, 340 aa, Artificial Sequence; identical to SEQ ID NO: 166
  source: /note="Description of Artificial Sequence: Synthetic anti-hHER2-HC-A162-GDS-ppan-MC-MMAF-LSWLLRLLN-L163 polypeptide"
  MOD_RES (47)..(47): Ser at this position is modified with ppan-MC-MMAF

SEQ ID NO: 1148 - protein, 340 aa, Artificial Sequence; identical to SEQ ID NO: 168
  source: /note="Description of Artificial Sequence: Synthetic anti-hHER2-HC-T164-GDS-ppan-MC-MMAF-LSWLLRLLN-S165 polypeptide"
  MOD_RES (49)..(49): Ser at this position is modified with ppan-MC-MMAF

SEQ ID NO: 1149 - protein, 340 aa, Artificial Sequence; identical to SEQ ID NO: 169
  source: /note="Description of Artificial Sequence: Synthetic anti-hHER2-HC-S165-GDS-ppan-MC-MMAF-LSWLLRLLN-G166 polypeptide"
  MOD_RES (50)..(50): Ser at this position is modified with ppan-MC-MMAF

SEQ ID NO: 1150 - protein, 340 aa, Artificial Sequence; identical to SEQ ID NO: 170
  source: /note="Description of Artificial Sequence: Synthetic anti-hHER2-HC-P171-GDS-ppan-MC-MMAF-LSWLLRLLN-A172 polypeptide"
  MOD_RES (56)..(56): Ser at this position is modified with ppan-MC-MMAF

SEQ ID NO: 1151 - protein, 340 aa, Artificial Sequence; identical to SEQ ID NO: 171
  source: /note="Description of Artificial Sequence: Synthetic anti-hHER2-HC-S176-GDS-ppan-MC-MMAF-LSWLLRLLN-S177 polypeptide"
  MOD_RES (61)..(61): Ser at this position is modified with ppan-MC-MMAF

SEQ ID NO: 1152 - protein, 340 aa, Artificial Sequence; identical to SEQ ID NO: 173
  source: /note="Description of Artificial Sequence: Synthetic anti-hHER2-HC-P189-GDS-ppan-MC-MMAF-LSWLLRLLN-S190 polypeptide"
  MOD_RES (74)..(74): Ser at this position is modified with ppan-MC-MMAF

SEQ ID NO: 1153 - protein, 340 aa, Artificial Sequence; identical to SEQ ID NO: 175
  source: /note="Description of Artificial Sequence: Synthetic anti-hHER2-HC-S191-GDS-ppan-MC-MMAF-LSWLLRLLN-S192 polypeptide"
  MOD_RES (76)..(76): Ser at this position is modified with ppan-MC-MMAF

SEQ ID NO: 1154 - protein, 340 aa, Artificial Sequence; identical to SEQ ID NO: 176
  source: /note="Description of Artificial Sequence: Synthetic anti-hHER2-HC-S192-GDS-ppan-MC-MMAF-LSWLLRLLN-L193 polypeptide"
  MOD_RES (77)..(77): Ser at this position is modified with ppan-MC-MMAF

SEQ ID NO: 1155 - protein, 340 aa, Artificial Sequence; identical to SEQ ID NO: 177
  source: /note="Description of Artificial Sequence: Synthetic anti-hHER2-HC-L193-GDS-ppan-MC-MMAF-LSWLLRLLN-G194 polypeptide"
  MOD_RES (78)..(78): Ser at this position is modified with ppan-MC-MMAF

SEQ ID NO: 1156 - protein, 340 aa, Artificial Sequence; identical to SEQ ID NO: 178
  source: /note="Description of Artificial Sequence: Synthetic anti-hHER2-HC-G194-GDS-ppan-MC-MMAF-LSWLLRLLN-T195 polypeptide"
  MOD_RES (79)..(79): Ser at this position is modified with ppan-MC-MMAF

SEQ ID NO: 1157 - protein, 340 aa, Artificial Sequence; identical to SEQ ID NO: 179
  source: /note="Description of Artificial Sequence: Synthetic anti-hHER2-HC-T195-GDS-ppan-MC-MMAF-LSWLLRLLN-Q196 polypeptide"
  MOD_RES (80)..(80): Ser at this position is modified with ppan-MC-MMAF

SEQ ID NO: 1158 - protein, 340 aa, Artificial Sequence; identical to SEQ ID NO: 180
  source: /note="Description of Artificial Sequence: Synthetic anti-hHER2-HC-Q196-GDS-ppan-MC-MMAF-LSWLLRLLN-T197 polypeptide"
  MOD_RES (81)..(81): Ser at this position is modified with ppan-MC-MMAF

SEQ ID NO: 1159 - protein, 340 aa, Artificial Sequence; identical to SEQ ID NO: 181
  source: /note="Description of Artificial Sequence: Synthetic anti-hHER2-HC-K205-GDS-ppan-MC-MMAF-LSWLLRLLN-P206 polypeptide"
  MOD_RES (90)..(90): Ser at this position is modified with ppan-MC-MMAF

SEQ ID NO: 1160 - protein, 340 aa, Artificial Sequence; identical to SEQ ID NO: 182
  source: /note="Description of Artificial Sequence: Synthetic anti-hHER2-HC-P206-GDS-ppan-MC-MMAF-LSWLLRLLN-S207 polypeptide"
  MOD_RES (91)..(91): Ser at this position is modified with ppan-MC-MMAF

SEQ ID NO: 1161 - protein, 340 aa, Artificial Sequence; identical to SEQ ID NO: 185
  source: /note="Description of Artificial Sequence: Synthetic anti-hHER2-HC-A231-GDS-ppan-MC-MMAF-LSWLLRLLN-P232 polypeptide"
  MOD_RES (116)..(116): Ser at this position is modified with ppan-MC-MMAF

SEQ ID NO: 1162 - protein, 340 aa, Artificial Sequence; identical to SEQ ID NO: 187
  source: /note="Description of Artificial Sequence: Synthetic anti-hHER2-HC-E233-GDS-ppan-MC-MMAF-LSWLLRLLN-L234 polypeptide"
  MOD_RES (118)..(118): Ser at this position is modified with ppan-MC-MMAF

SEQ ID NO: 1163 - protein, 340 aa, Artificial Sequence; identical to SEQ ID NO: 189
  source: /note="Description of Artificial Sequence: Synthetic anti-hHER2-HC-L235-GDS-ppan-MC-MMAF-LSWLLRLLN-G236 polypeptide"
  MOD_RES (120)..(120): Ser at this position is modified with ppan-MC-MMAF

SEQ ID NO: 1164 - protein, 340 aa, Artificial Sequence; identical to SEQ ID NO: 191
  source: /note="Description of Artificial Sequence: Synthetic anti-hHER2-HC-P244-GDS-ppan-MC-MMAF-LSWLLRLLN-P245 polypeptide"
  MOD_RES (129)..(129): Ser at this position is modified with ppan-MC-MMAF

SEQ ID NO: 1165 - protein, 340 aa, Artificial Sequence; identical to SEQ ID NO: 193
  source: /note="Description of Artificial Sequence: Synthetic anti-hHER2-HC-I253-GDS-ppan-MC-MMAF-LSWLLRLLN-S254 polypeptide"
  MOD_RES (138)..(138): Ser at this position is modified with ppan-MC-MMAF

SEQ ID NO: 1166 - protein, 340 aa, Artificial Sequence; identical to SEQ ID NO: 194
  source: /note="Description of Artificial Sequence: Synthetic anti-hHER2-HC-S254-GDS-ppan-MC-MMAF-LSWLLRLLN-R255 polypeptide"
  MOD_RES (139)..(139): Ser at this position is modified with ppan-MC-MMAF

SEQ ID NO: 1167 - protein, 340 aa, Artificial Sequence; identical to SEQ ID NO: 195
  source: /note="Description of Artificial Sequence: Synthetic anti-hHER2-HC-R255-GDS-ppan-MC-MMAF-LSWLLRLLN-T256 polypeptide"
  MOD_RES (140)..(140): Ser at this position is modified with ppan-MC-MMAF

SEQ ID NO: 1168 - protein, 340 aa, Artificial Sequence; identical to SEQ ID NO: 198
  source: /note="Description of Artificial Sequence: Synthetic anti-hHER2-HC-S267-GDS-ppan-MC-MMAF-LSWLLRLLN-H268 polypeptide"
  MOD_RES (152)..(152): Ser at this position is modified with ppan-MC-MMAF

SEQ ID NO: 1169 - protein, 340 aa, Artificial Sequence; identical to SEQ ID NO: 199
  source: /note="Description of Artificial Sequence: Synthetic anti-hHER2-HC-H268-GDS-ppan-MC-MMAF-LSWLLRLLN-E269 polypeptide"
  MOD_RES (153)..(153): Ser at this position is modified with ppan-MC-MMAF

SEQ ID NO: 1170 - protein, 340 aa, Artificial Sequence; identical to SEQ ID NO: 200
  source: /note="Description of Artificial Sequence: Synthetic anti-hHER2-HC-E269-GDS-ppan-MC-MMAF-LSWLLRLLN-D270 polypeptide"
  MOD_RES (154)..(154): Ser at this position is modified with ppan-MC-MMAF

SEQ ID NO: 1171 - protein, 340 aa, Artificial Sequence; identical to SEQ ID NO: 201
  source: /note="Description of Artificial Sequence: Synthetic anti-hHER2-HC-D270-GDS-ppan-MC-MMAF-LSWLLRLLN-P271 polypeptide"
  MOD_RES (155)..(155): Ser at this position is modified with ppan-MC-MMAF

SEQ ID NO: 1172 - protein, 340 aa, Artificial Sequence; identical to SEQ ID NO: 202
  source: /note="Description of Artificial Sequence: Synthetic anti-hHER2-HC-P271-GDS-ppan-MC-MMAF-LSWLLRLLN-E272 polypeptide"
  MOD_RES (156)..(156): Ser at this position is modified with ppan-MC-MMAF

SEQ ID NO: 1173 - protein, 340 aa, Artificial Sequence; identical to SEQ ID NO: 206
  source: /note="Description of Artificial Sequence: Synthetic anti-hHER2-HC-P291-GDS-ppan-MC-MMAF-LSWLLRLLN-R292 polypeptide"
  MOD_RES (176)..(176): Ser at this position is modified with ppan-MC-MMAF

SEQ ID NO: 1174 - protein, 340 aa, Artificial Sequence; identical to SEQ ID NO: 207
  source: /note="Description of Artificial Sequence: Synthetic anti-hHER2-HC-T307-GDS-ppan-MC-MMAF-LSWLLRLLN-V308 polypeptide"
  MOD_RES (192)..(192): Ser at this position is modified with ppan-MC-MMAF

SEQ ID NO: 1175 - protein, 340 aa, Artificial Sequence; identical to SEQ ID NO: 209
  source: /note="Description of Artificial Sequence: Synthetic anti-hHER2-HC-L309-GDS-ppan-MC-MMAF-LSWLLRLLN-H310 polypeptide"
  MOD_RES (194)..(194): Ser at this position is modified with ppan-MC-MMAF

SEQ ID NO: 1176 - protein, 340 aa, Artificial Sequence; identical to SEQ ID NO: 211
  source: /note="Description of Artificial Sequence: Synthetic anti-hHER2-HC-N315-GDS-ppan-MC-MMAF-LSWLLRLLN-G316 polypeptide"
  MOD_RES (200)..(200): Ser at this position is modified with ppan-MC-MMAF

SEQ ID NO: 1177 - protein, 340 aa, Artificial Sequence; identical to SEQ ID NO: 212
  source: /note="Description of Artificial Sequence: Synthetic anti-hHER2-HC-G316-GDS-ppan-MC-MMAF-LSWLLRLLN-K317 polypeptide"
  MOD_RES (201)..(201): Ser at this position is modified with ppan-MC-MMAF

SEQ ID NO: 1178 - protein, 340 aa, Artificial Sequence; identical to SEQ ID NO: 215
  source: /note="Description of Artificial Sequence: Synthetic anti-hHER2-HC-A327-GDS-ppan-MC-MMAF-LSWLLRLLN-L328 polypeptide"
  MOD_RES (212)..(212): Ser at this position is modified with ppan-MC-MMAF

SEQ ID NO: 1179 - protein, 340 aa, Artificial Sequence; identical to SEQ ID NO: 216
  source: /note="Description of Artificial Sequence: Synthetic anti-hHER2-HC-L328-GDS-ppan-MC-MMAF-LSWLLRLLN-P329 polypeptide"
  MOD_RES (213)..(213): Ser at this position is modified with ppan-MC-MMAF

SEQ ID NO: 1180 - protein, 340 aa, Artificial Sequence; identical to SEQ ID NO: 217
  source: /note="Description of Artificial Sequence: Synthetic anti-hHER2-HC-P329-GDS-ppan-MC-MMAF-LSWLLRLLN-A330 polypeptide"
  MOD_RES (214)..(214): Ser at this position is modified with ppan-MC-MMAF

SEQ ID NO: 1181 - protein, 340 aa, Artificial Sequence; identical to SEQ ID NO: 218
  source: /note="Description of Artificial Sequence: Synthetic anti-hHER2-HC-A330-GDS-ppan-MC-MMAF-LSWLLRLLN-P331 polypeptide"
  MOD_RES (215)..(215): Ser at this position is modified with ppan-MC-MMAF

SEQ ID NO: 1182 - protein, 340 aa, Artificial Sequence; identical to SEQ ID NO: 220
  source: /note="Description of Artificial Sequence: Synthetic anti-hHER2-HC-K340-GDS-ppan-MC-MMAF-LSWLLRLLN-G341 polypeptide"
  MOD_RES (225)..(225): Ser at this position is modified with ppan-MC-MMAF

SEQ ID NO: 1183 - protein, 340 aa, Artificial Sequence; identical to SEQ ID NO: 221
  source: /note="Description of Artificial Sequence: Synthetic anti-hHER2-HC-G341-GDS-ppan-MC-MMAF-LSWLLRLLN-Q342 polypeptide"
  MOD_RES (226)..(226): Ser at this position is modified with ppan-MC-MMAF

SEQ ID NO: 1184 - protein, 340 aa, Artificial Sequence; identical to SEQ ID NO: 222
  source: /note="Description of Artificial Sequence: Synthetic anti-hHER2-HC-Q342-GDS-ppan-MC-MMAF-LSWLLRLLN-P343 polypeptide"
  MOD_RES (227)..(227): Ser at this position is modified with ppan-MC-MMAF

SEQ ID NO: 1185 - protein, 340 aa, Artificial Sequence; identical to SEQ ID NO: 223
  source: /note="Description of Artificial Sequence: Synthetic anti-hHER2-HC-P343-GDS-ppan-MC-MMAF-LSWLLRLLN-R344 polypeptide"
  MOD_RES (228)..(228): Ser at this position is modified with ppan-MC-MMAF

SEQ ID NO: 1186 - protein, 340 aa, Artificial Sequence; identical to SEQ ID NO: 224
  source: /note="Description of Artificial Sequence: Synthetic anti-hHER2-HC-R344-GDS-ppan-MC-MMAF-LSWLLRLLN-E345 polypeptide"
  MOD_RES (229)..(229): Ser at this position is modified with ppan-MC-MMAF

SEQ ID NO: 1187 - protein, 340 aa, Artificial Sequence; identical to SEQ ID NO: 229
  source: /note="Description of Artificial Sequence: Synthetic anti-hHER2-HC-K360-GDS-ppan-MC-MMAF-LSWLLRLLN-N361 polypeptide"
  MOD_RES (245)..(245): Ser at this position is modified with ppan-MC-MMAF

SEQ ID NO: 1188 - protein, 340 aa, Artificial Sequence; identical to SEQ ID NO: 230
  source: /note="Description of Artificial Sequence: Synthetic anti-hHER2-HC-N384-GDS-ppan-MC-MMAF-LSWLLRLLN-G385 polypeptide"
  MOD_RES (269)..(269): Ser at this position is modified with ppan-MC-MMAF

SEQ ID NO: 1189 - protein, 340 aa, Artificial Sequence; identical to SEQ ID NO: 232
  source: /note="Description of Artificial Sequence: Synthetic anti-hHER2-HC-T394-GDS-ppan-MC-MMAF-LSWLLRLLN-P395 polypeptide"
  MOD_RES (279)..(279): Ser at this position is modified with ppan-MC-MMAF

SEQ ID NO: 1190 - protein, 340 aa, Artificial Sequence; identical to SEQ ID NO: 233
  source: /note="Description of Artificial Sequence: Synthetic anti-hHER2-HC-P395-GDS-ppan-MC-MMAF-LSWLLRLLN-P396 polypeptide"
  MOD_RES (280)..(280): Ser at this position is modified with ppan-MC-MMAF

SEQ ID NO: 1191 - protein, 340 aa, Artificial Sequence; identical to SEQ ID NO: 235
  source: /note="Description of Artificial Sequence: Synthetic anti-hHER2-HC-D401-GDS-ppan-MC-MMAF-LSWLLRLLN-G402 polypeptide"
  MOD_RES (286)..(286): Ser at this position is modified with ppan-MC-MMAF

SEQ ID NO: 1192 - protein, 340 aa, Artificial Sequence; identical to SEQ ID NO: 236
  source: /note="Description of Artificial Sequence: Synthetic anti-hHER2-HC-S415-GDS-ppan-MC-MMAF-LSWLLRLLN-R416 polypeptide"
  MOD_RES (300)..(300): Ser at this position is modified with ppan-MC-MMAF

SEQ ID NO: 1193 - protein, 340 aa, Artificial Sequence; identical to SEQ ID NO: 237
  source: /note="Description of Artificial Sequence: Synthetic anti-hHER2-HC-R416-GDS-ppan-MC-MMAF-LSWLLRLLN-W417 polypeptide"
  MOD_RES (301)..(301): Ser at this position is modified with ppan-MC-MMAF

SEQ ID NO: 1194 - protein, 340 aa, Artificial Sequence; identical to SEQ ID NO: 238
  source: /note="Description of Artificial Sequence: Synthetic anti-hHER2-HC-W417-GDS-ppan-MC-MMAF-LSWLLRLLN-Q418 polypeptide"
  MOD_RES (302)..(302): Ser at this position is modified with ppan-MC-MMAF

SEQ ID NO: 1195 - protein, 340 aa, Artificial Sequence; identical to SEQ ID NO: 239
  source: /note="Description of Artificial Sequence: Synthetic anti-hHER2-HC-Q418-GDS-ppan-MC-MMAF-LSWLLRLLN-Q419 polypeptide"
  MOD_RES (303)..(303): Ser at this position is modified with ppan-MC-MMAF

SEQ ID NO: 1196 - protein, 340 aa, Artificial Sequence; identical to SEQ ID NO: 243
  source: /note="Description of Artificial Sequence: Synthetic anti-hHER2-HC-H433-GDS-ppan-MC-MMAF-LSWLLRLLN-N434 polypeptide"
  MOD_RES (318)..(318): Ser at this position is modified with ppan-MC-MMAF

SEQ ID NO: 1197 - protein, 340 aa, Artificial Sequence; identical to SEQ ID NO: 244
  source: /note="Description of Artificial Sequence: Synthetic anti-hHER2-HC-N434-GDS-ppan-MC-MMAF-LSWLLRLLN-H435 polypeptide"
  MOD_RES (319)..(319): Ser at this position is modified with ppan-MC-MMAF

SEQ ID NO: 1198 - protein, 340 aa, Artificial Sequence; identical to SEQ ID NO: 246
  source: /note="Description of Artificial Sequence: Synthetic anti-hHER2-HC-L443-GDS-ppan-MC-MMAF-LSWLLRLLN-S444 polypeptide"
  MOD_RES (328)..(328): Ser at this position is modified with ppan-MC-MMAF

SEQ ID NO: 1199 - protein, 340 aa, Artificial Sequence; identical to SEQ ID NO: 248
  source: /note="Description of Artificial Sequence: Synthetic anti-hHER2-HC-P445-GDS-ppan-MC-MMAF-LSWLLRLLN-G446 polypeptide"
  MOD_RES (330)..(330): Ser at this position is modified with ppan-MC-MMAF

SEQ ID NO: 1200 - protein, 339 aa, Artificial Sequence; identical to SEQ ID NO: 249
  source: /note="Description of Artificial Sequence: Synthetic anti-hHER2-HC-A118-DS-ppan-MC-MMAF-LEFIASKLA-S119 polypeptide"
  MOD_RES (2)..(2): Ser at this position is modified with ppan-MC-MMAF

SEQ ID NO: 1201 - protein, 339 aa, Artificial Sequence; identical to SEQ ID NO: 250
  source: /note="Description of Artificial Sequence: Synthetic anti-hHER2-HC-S119-DS-ppan-MC-MMAF-LEFIASKLA-T120 polypeptide"
  MOD_RES (3)..(3): Ser at this position is modified with ppan-MC-MMAF

SEQ ID NO: 1202 - protein, 339 aa, Artificial Sequence; identical to SEQ ID NO: 251
  source: /note="Description of Artificial Sequence: Synthetic anti-hHER2-HC-T120-DS-ppan-MC-MMAF-LEFIASKLA-K121 polypeptide"
  MOD_RES (4)..(4): Ser at this position is modified with ppan-MC-MMAF

SEQ ID NO: 1203 - protein, 339 aa, Artificial Sequence; identical to SEQ ID NO: 257
  source: /note="Description of Artificial Sequence: Synthetic anti-hHER2-HC-S136-DS-ppan-MC-MMAF-LEFIASKLA-137 polypeptide"
  MOD_RES (20)..(20): Ser at this position is modified with ppan-MC-MMAF

SEQ ID NO: 1204 - protein, 339 aa, Artificial Sequence; identical to SEQ ID NO: 259
  source: /note="Description of Artificial Sequence: Synthetic anti-hHER2-HC-G138-DS-ppan-MC-MMAF-LEFIASKLA-T139 polypeptide"
  MOD_RES (22)..(22): Ser at this position is modified with ppan-MC-MMAF

SEQ ID NO: 1205 - protein, 339 aa, Artificial Sequence; identical to SEQ ID NO: 261
  source: /note="Description of Artificial Sequence: Synthetic anti-hHER2-HC-P153-DS-ppan-MC-MMAF-LEFIASKLA-V154 polypeptide"
  MOD_RES (37)..(37): Ser at this position is modified with ppan-MC-MMAF

SEQ ID NO: 1206 - protein, 339 aa, Artificial Sequence; identical to SEQ ID NO: 262
  source: /note="Description of Artificial Sequence: Synthetic anti-hHER2-HC-N159-DS-ppan-MC-MMAF-LEFIASKLA-S160 polypeptide"
  MOD_RES (43)..(43): Ser at this position is modified with ppan-MC-MMAF

SEQ ID NO: 1207 - protein, 339 aa, Artificial Sequence; identical to SEQ ID NO: 265
  source: /note="Description of Artificial Sequence: Synthetic anti-hHER2-HC-A162-DS-ppan-MC-MMAF-LEFIASKLA-L163 polypeptide"
  MOD_RES (46)..(46): Ser at this position is modified with ppan-MC-MMAF

SEQ ID NO: 1208 - protein, 339 aa, Artificial Sequence; identical to SEQ ID NO: 267
  source: /note="Description of Artificial Sequence: Synthetic anti-hHER2-HC-T164-DS-ppan-MC-MMAF-LEFIASKLA-S165 polypeptide"
  MOD_RES (48)..(48): Ser at this position is modified with ppan-MC-MMAF

SEQ ID NO: 1209 - protein, 339 aa, Artificial Sequence; identical to SEQ ID NO: 268
  source: /note="Description of Artificial Sequence: Synthetic anti-hHER2-HC-S165-DS-ppan-MC-MMAF-LEFIASKLA-G166 polypeptide"
  MOD_RES (49)..(49): Ser at this position is modified with ppan-MC-MMAF

SEQ ID NO: 1210 - protein, 339 aa, Artificial Sequence; identical to SEQ ID NO: 269
  source: /note="Description of Artificial Sequence: Synthetic anti-hHER2-HC-P171-DS-ppan-MC-MMAF-LEFIASKLA-A172 polypeptide"
  MOD_RES (55)..(55): Ser at this position is modified with ppan-MC-MMAF

SEQ ID NO: 1211 - protein, 339 aa, Artificial Sequence; identical to SEQ ID NO: 270
  source: /note="Description of Artificial Sequence: Synthetic anti-hHER2-HC-S176-DS-ppan-MC-MMAF-LEFIASKLA-S177 polypeptide"
  MOD_RES (60)..(60): Ser at this position is modified with ppan-MC-MMAF

SEQ ID NO: 1212 - protein, 339 aa, Artificial Sequence; identical to SEQ ID NO: 273
  source: /note="Description of Artificial Sequence: Synthetic anti-hHER2-HC-S190-DS-ppan-MC-MMAF-LEFIASKLA-S191 polypeptide"
  MOD_RES (74)..(74): Ser at this position is modified with ppan-MC-MMAF

SEQ ID NO: 1213 - protein, 339 aa, Artificial Sequence; identical to SEQ ID NO: 274
  source: /note="Description of Artificial Sequence: Synthetic anti-hHER2-HC-S191-DS-ppan-MC-MMAF-LEFIASKLA-S192 polypeptide"
  MOD_RES (75)..(75): Ser at this position is modified with ppan-MC-MMAF

SEQ ID NO: 1214 - protein, 339 aa, Artificial Sequence; identical to SEQ ID NO: 275
  source: /note="Description of Artificial Sequence: Synthetic anti-hHER2-HC-S192-DS-ppan-MC-MMAF-LEFIASKLA-L193 polypeptide"
  MOD_RES (76)..(76): Ser at this position is modified with ppan-MC-MMAF

SEQ ID NO: 1215 - protein, 339 aa, Artificial Sequence; identical to SEQ ID NO: 277
  source: /note="Description of Artificial Sequence: Synthetic anti-hHER2-HC-G194-DS-ppan-MC-MMAF-LEFIASKLA-T195 polypeptide"
  MOD_RES (78)..(78): Ser at this position is modified with ppan-MC-MMAF

SEQ ID NO: 1216 - protein, 339 aa, Artificial Sequence; identical to SEQ ID NO: 278
  source: /note="Description of Artificial Sequence: Synthetic anti-hHER2-HC-T195-DS-ppan-MC-MMAF-LEFIASKLA-Q196 polypeptide"
  MOD_RES (79)..(79): Ser at this position is modified with ppan-MC-MMAF

SEQ ID NO: 1217 - protein, 339 aa, Artificial Sequence; identical to SEQ ID NO: 279
  source: /note="Description of Artificial Sequence: Synthetic anti-hHER2-HC-Q196-DS-ppan-MC-MMAF-LEFIASKLA-T197 polypeptide"
  MOD_RES (80)..(80): Ser at this position is modified with ppan-MC-MMAF

SEQ ID NO: 1218 - protein, 339 aa, Artificial Sequence; identical to SEQ ID NO: 280
  source: /note="Description of Artificial Sequence: Synthetic anti-hHER2-HC-K205-DS-ppan-MC-MMAF-LEFIASKLA-P206 polypeptide"
  MOD_RES (89)..(89): Ser at this position is modified with ppan-MC-MMAF

SEQ ID NO: 1219 - protein, 339 aa, Artificial Sequence; identical to SEQ ID NO: 281
  source: /note="Description of Artificial Sequence: Synthetic anti-hHER2-HC-P206-DS-ppan-MC-MMAF-LEFIASKLA-S207 polypeptide"
  MOD_RES (90)..(90): Ser at this position is modified with ppan-MC-MMAF

SEQ ID NO: 1220 - protein, 339 aa, Artificial Sequence; identical to SEQ ID NO: 286
  source: /note="Description of Artificial Sequence: Synthetic anti-hHER2-HC-E233-DS-ppan-MC-MMAF-LEFIASKLA-L234 polypeptide"
  MOD_RES (117)..(117): Ser at this position is modified with ppan-MC-MMAF

SEQ ID NO: 1221 - protein, 339 aa, Artificial Sequence; identical to SEQ ID NO: 288
  source: /note="Description of Artificial Sequence: Synthetic anti-hHER2-HC-L235-DS-ppan-MC-MMAF-LEFIASKLA-G236 polypeptide"
  MOD_RES (119)..(119): Ser at this position is modified with ppan-MC-MMAF

SEQ ID NO: 1222 - protein, 339 aa, Artificial Sequence; identical to SEQ ID NO: 289
  source: /note="Description of Artificial Sequence: Synthetic anti-hHER2-HC-G236-DS-ppan-MC-MMAF-LEFIASKLA-G237 polypeptide"
  MOD_RES (120)..(120): Ser at this position is modified with ppan-MC-MMAF

SEQ ID NO: 1223 - protein, 339 aa, Artificial Sequence; identical to SEQ ID NO: 290
  source: /note="Description of Artificial Sequence: Synthetic anti-hHER2-HC-P244-DS-ppan-MC-MMAF-LEFIASKLA-P245 polypeptide"
  MOD_RES (128)..(128): Ser at this position is modified with ppan-MC-MMAF

SEQ ID NO: 1224 - protein, 339 aa, Artificial Sequence; identical to SEQ ID NO: 291
  source: /note="Description of Artificial Sequence: Synthetic anti-hHER2-HC-P245-DS-ppan-MC-MMAF-LEFIASKLA-K246 polypeptide"
  MOD_RES (129)..(129): Ser at this position is modified with ppan-MC-MMAF

SEQ ID NO: 1225 - protein, 339 aa, Artificial Sequence; identical to SEQ ID NO: 292
  source: /note="Description of Artificial Sequence: Synthetic anti-hHER2-HC-I253-DS-ppan-MC-MMAF-LEFIASKLA-S254 polypeptide"
  MOD_RES (137)..(137): Ser at this position is modified with ppan-MC-MMAF

SEQ ID NO: 1226 - protein, 339 aa, Artificial Sequence; identical to SEQ ID NO: 293
  source: /note="Description of Artificial Sequence: Synthetic anti-hHER2-HC-S254-DS-ppan-MC-MMAF-LEFIASKLA-R255 polypeptide"
  MOD_RES (138)..(138): Ser at this position is modified with ppan-MC-MMAF

SEQ ID NO: 1227 - protein, 339 aa, Artificial Sequence; identical to SEQ ID NO: 294
  source: /note="Description of Artificial Sequence: Synthetic anti-hHER2-HC-R255-DS-ppan-MC-MMAF-LEFIASKLA-T256 polypeptide"
  MOD_RES (139)..(139): Ser at this position is modified with ppan-MC-MMAF

SEQ ID NO: 1228 - protein, 339 aa, Artificial Sequence; identical to SEQ ID NO: 296
  source: /note="Description of Artificial Sequence: Synthetic anti-hHER2-HC-P257-DS-ppan-MC-MMAF-LEFIASKLA-E258 polypeptide"
  MOD_RES (141)..(141): Ser at this position is modified with ppan-MC-MMAF

SEQ ID NO: 1229 - protein, 339 aa, Artificial Sequence; identical to SEQ ID NO: 297
  source: /note="Description of Artificial Sequence: Synthetic anti-hHER2-HC-S267-DS-ppan-MC-MMAF-LEFIASKLA-H268 polypeptide"
  MOD_RES (151)..(151): Ser at this position is modified with ppan-MC-MMAF

SEQ ID NO: 1230 - protein, 339 aa, Artificial Sequence; identical to SEQ ID NO: 298
  source: /note="Description of Artificial Sequence: Synthetic anti-hHER2-HC-H268-DS-ppan-MC-MMAF-LEFIASKLA-E269 polypeptide"
  MOD_RES (152)..(152): Ser at this position is modified with ppan-MC-MMAF

SEQ ID NO: 1231 - protein, 339 aa, Artificial Sequence; identical to SEQ ID NO: 299
  source: /note="Description of Artificial Sequence: Synthetic anti-hHER2-HC-E269-DS-ppan-MC-MMAF-LEFIASKLA-D270 polypeptide"
  MOD_RES (153)..(153): Ser at this position is modified with ppan-MC-MMAF

SEQ ID NO: 1232 - protein, 339 aa, Artificial Sequence; identical to SEQ ID NO: 300
  source: /note="Description of Artificial Sequence: Synthetic anti-hHER2-HC-D270-DS-ppan-MC-MMAF-LEFIASKLA-P271 polypeptide"
  MOD_RES (154)..(154): Ser at this position is modified with ppan-MC-MMAF

SEQ ID NO: 1233 - protein, 339 aa, Artificial Sequence; identical to SEQ ID NO: 301
  source: /note="Description of Artificial Sequence: Synthetic anti-hHER2-HC-P271-DS-ppan-MC-MMAF-LEFIASKLA-E272 polypeptide"
  MOD_RES (155)..(155): Ser at this position is modified with ppan-MC-MMAF

SEQ ID NO: 1234 - protein, 339 aa, Artificial Sequence; identical to SEQ ID NO: 302
  source: /note="Description of Artificial Sequence: Synthetic anti-hHER2-HC-D280-DS-ppan-MC-MMAF-LEFIASKLA-G281 polypeptide"
  MOD_RES (164)..(164): Ser at this position is modified with ppan-MC-MMAF

SEQ ID NO: 1235 - protein, 339 aa, Artificial Sequence; identical to SEQ ID NO: 303
  source: /note="Description of Artificial Sequence: Synthetic anti-hHER2-HC-H285-DS-ppan-MC-MMAF-LEFIASKLA-N286 polypeptide"
  MOD_RES (169)..(169): Ser at this position is modified with ppan-MC-MMAF

SEQ ID NO: 1236 - protein, 339 aa, Artificial Sequence; identical to SEQ ID NO: 304
  source: /note="Description of Artificial Sequence: Synthetic anti-hHER2-HC-N286-DS-ppan-MC-MMAF-LEFIASKLA-A287 polypeptide"
  MOD_RES (170)..(170): Ser at this position is modified with ppan-MC-MMAF

SEQ ID NO: 1237 - protein, 339 aa, Artificial Sequence; identical to SEQ ID NO: 305
  source: /note="Description of Artificial Sequence: Synthetic anti-hHER2-HC-P291-DS-ppan-MC-MMAF-LEFIASKLA-R292 polypeptide"
  MOD_RES (175)..(175): Ser at this position is modified with ppan-MC-MMAF

SEQ ID NO: 1238 - protein, 339 aa, Artificial Sequence; identical to SEQ ID NO: 310
  source: /note="Description of Artificial Sequence: Synthetic anti-hHER2-HC-N315-DS-ppan-MC-MMAF-LEFIASKLA-G316 polypeptide"
  MOD_RES (199)..(199): Ser at this position is modified with ppan-MC-MMAF

SEQ ID NO: 1239 - protein, 339 aa, Artificial Sequence; identical to SEQ ID NO: 311
  source: /note="Description of Artificial Sequence: Synthetic anti-hHER2-HC-G316-DS-ppan-MC-MMAF-LEFIASKLA-K317 polypeptide"
  MOD_RES (200)..(200): Ser at this position is modified with ppan-MC-MMAF

SEQ ID NO: 1240 - protein, 339 aa, Artificial Sequence; identical to SEQ ID NO: 312
  source: /note="Description of Artificial Sequence: Synthetic anti-hHER2-HC-K317-DS-ppan-MC-MMAF-LEFIASKLA-E318 polypeptide"
  MOD_RES (201)..(201): Ser at this position is modified with ppan-MC-MMAF

SEQ ID NO: 1241 - protein, 339 aa, Artificial Sequence; identical to SEQ ID NO: 313
  source: /note="Description of Artificial Sequence: Synthetic anti-hHER2-HC-K326-DS-ppan-MC-MMAF-LEFIASKLA-A327 polypeptide"
  MOD_RES (210)..(210): Ser at this position is modified with ppan-MC-MMAF

SEQ ID NO: 1242 - protein, 339 aa, Artificial Sequence; identical to SEQ ID NO: 314
  source: /note="Description of Artificial Sequence: Synthetic anti-hHER2-HC-A327-DS-ppan-MC-MMAF-LEFIASKLA-L328 polypeptide"
  MOD_RES (211)..(211): Ser at this position is modified with ppan-MC-MMAF

SEQ ID NO: 1243 - protein, 339 aa, Artificial Sequence; identical to SEQ ID NO: 315
  source: /note="Description of Artificial Sequence: Synthetic anti-hHER2-HC-L328-DS-ppan-MC-MMAF-LEFIASKLA-P329 polypeptide"
  MOD_RES (212)..(212): Ser at this position is modified with ppan-MC-MMAF

SEQ ID NO: 1244 - protein, 339 aa, Artificial Sequence; identical to SEQ ID NO: 316
  source: /note="Description of Artificial Sequence: Synthetic anti-hHER2-HC-P329-DS-ppan-MC-MMAF-LEFIASKLA-A330 polypeptide"
  MOD_RES (213)..(213): Ser at this position is modified with ppan-MC-MMAF

SEQ ID NO: 1245 - protein, 339 aa, Artificial Sequence; identical to SEQ ID NO: 317
  source: /note="Description of Artificial Sequence: Synthetic anti-hHER2-HC-A330-DS-ppan-MC-MMAF-LEFIASKLA-P331 polypeptide"
  MOD_RES (214)..(214): Ser at this position is modified with ppan-MC-MMAF

SEQ ID NO: 1246 - protein, 339 aa, Artificial Sequence; identical to SEQ ID NO: 318
  source: /note="Description of Artificial Sequence: Synthetic anti-hHER2-HC-A339-DS-ppan-MC-MMAF-LEFIASKLA-K340 polypeptide"
  MOD_RES (223)..(223): Ser at this position is modified with ppan-MC-MMAF

SEQ ID NO: 1247 - protein, 339 aa, Artificial Sequence; identical to SEQ ID NO: 319
  source: /note="Description of Artificial Sequence: Synthetic anti-hHER2-HC-K340-DS-ppan-MC-MMAF-LEFIASKLA-G341 polypeptide"
  MOD_RES (224)..(224): Ser at this position is modified with ppan-MC-MMAF

SEQ ID NO: 1248 - protein, 339 aa, Artificial Sequence; identical to SEQ ID NO: 320
  source: /note="Description of Artificial Sequence: Synthetic anti-hHER2-HC-G341-DS-ppan-MC-MMAF-LEFIASKLA-Q342 polypeptide"
  MOD_RES (225)..(225): Ser at this position is modified with ppan-MC-MMAF

SEQ ID NO: 1249 - protein, 339 aa, Artificial Sequence; identical to SEQ ID NO: 321
  source: /note="Description of Artificial Sequence: Synthetic anti-hHER2-HC-Q342-DS-ppan-MC-MMAF-LEFIASKLA-P343 polypeptide"
  MOD_RES (226)..(226): Ser at this position is modified with ppan-MC-MMAF

SEQ ID NO: 1250 - protein, 339 aa, Artificial Sequence; identical to SEQ ID NO: 322
  source: /note="Description of Artificial Sequence: Synthetic anti-hHER2-HC-P343-DS-ppan-MC-MMAF-LEFIASKLA-R344 polypeptide"
  MOD_RES (227)..(227): Ser at this position is modified with ppan-MC-MMAF

SEQ ID NO: 1251 - protein, 339 aa, Artificial Sequence; identical to SEQ ID NO: 323
  source: /note="Description of Artificial Sequence: Synthetic anti-hHER2-HC-R344-DS-ppan-MC-MMAF-LEFIASKLA-E345 polypeptide"
  MOD_RES (228)..(228): Ser at this position is modified with ppan-MC-MMAF

SEQ ID NO: 1252 - protein, 339 aa, Artificial Sequence; identical to SEQ ID NO: 325
  source: /note="Description of Artificial Sequence: Synthetic anti-hHER2-HC-E356-DS-ppan-MC-MMAF-LEFIASKLA-E357 polypeptide"
  MOD_RES (240)..(240): Ser at this position is modified with ppan-MC-MMAF

SEQ ID NO: 1253 - protein, 339 aa, Artificial Sequence; identical to SEQ ID NO: 327
  source: /note="Description of Artificial Sequence: Synthetic anti-hHER2-HC-M358-DS-ppan-MC-MMAF-LEFIASKLA-T359 polypeptide"
  MOD_RES (242)..(242): Ser at this position is modified with ppan-MC-MMAF

SEQ ID NO: 1254 - protein, 339 aa, Artificial Sequence; identical to SEQ ID NO: 328
  source: /note="Description of Artificial Sequence: Synthetic anti-hHER2-HC-K360-DS-ppan-MC-MMAF-LEFIASKLA-N361 polypeptide"
  MOD_RES (244)..(244): Ser at this position is modified with ppan-MC-MMAF

SEQ ID NO: 1255 - protein, 339 aa, Artificial Sequence; identical to SEQ ID NO: 329
  source: /note="Description of Artificial Sequence: Synthetic anti-hHER2-HC-N384-DS-ppan-MC-MMAF-LEFIASKLA-G385 polypeptide"
  MOD_RES (268)..(268): Ser at this position is modified with ppan-MC-MMAF

SEQ ID NO: 1256 - protein, 339 aa, Artificial Sequence; identical to SEQ ID NO: 330
  source: /note="Description of Artificial Sequence: Synthetic anti-hHER2-HC-N389-DS-ppan-MC-MMAF-LEFIASKLA-N390 polypeptide"
  MOD_RES (273)..(273): Ser at this position is modified with ppan-MC-MMAF

SEQ ID NO: 1257 - protein, 339 aa, Artificial Sequence; identical to SEQ ID NO: 332
  source: /note="Description of Artificial Sequence: Synthetic anti-hHER2-HC-P395-DS-ppan-MC-MMAF-LEFIASKLA-P396 polypeptide"
  MOD_RES (279)..(279): Ser at this position is modified with ppan-MC-MMAF

SEQ ID NO: 1258 - protein, 339 aa, Artificial Sequence; identical to SEQ ID NO: 333
  source: /note="Description of Artificial Sequence: Synthetic anti-hHER2-HC-D399-DS-ppan-MC-MMAF-LEFIASKLA-S400 polypeptide"
  MOD_RES (283)..(283): Ser at this position is modified with ppan-MC-MMAF

SEQ ID NO: 1259 - protein, 339 aa, Artificial Sequence; identical to SEQ ID NO: 335
  source: /note="Description of Artificial Sequence: Synthetic anti-hHER2-HC-D401-DS-ppan-MC-MMAF-LEFIASKLA-G402 polypeptide"
  MOD_RES (285)..(285): Ser at this position is modified with ppan-MC-MMAF

SEQ ID NO: 1260 - protein, 339 aa, Artificial Sequence; identical to SEQ ID NO: 336
  source: /note="Description of Artificial Sequence: Synthetic anti-hHER2-HC-S415-DS-ppan-MC-MMAF-LEFIASKLA-R416 polypeptide"
  MOD_RES (299)..(299): Ser at this position is modified with ppan-MC-MMAF

SEQ ID NO: 1261 - protein, 339 aa, Artificial Sequence; identical to SEQ ID NO: 337
  source: /note="Description of Artificial Sequence: Synthetic anti-hHER2-HC-R416-DS-ppan-MC-MMAF-LEFIASKLA-W417 polypeptide"
  MOD_RES (300)..(300): Ser at this position is modified with ppan-MC-MMAF

SEQ ID NO: 1262 - protein, 339 aa, Artificial Sequence; identical to SEQ ID NO: 338
  source: /note="Description of Artificial Sequence: Synthetic anti-hHER2-HC-W417-DS-ppan-MC-MMAF-LEFIASKLA-Q418 polypeptide"
  MOD_RES (301)..(301): Ser at this position is modified with ppan-MC-MMAF

SEQ ID NO: 1263 - protein, 339 aa, Artificial Sequence; identical to SEQ ID NO: 339
  source: /note="Description of Artificial Sequence: Synthetic anti-hHER2-HC-Q418-DS-ppan-MC-MMAF-LEFIASKLA-Q419 polypeptide"
  MOD_RES (302)..(302): Ser at this position is modified with ppan-MC-MMAF

SEQ ID NO: 1264 - protein, 339 aa, Artificial Sequence; identical to SEQ ID NO: 340
  source: /note="Description of Artificial Sequence: Synthetic anti-hHER2-HC-Q419-DS-ppan-MC-MMAF-LEFIASKLA-G420 polypeptide"
  MOD_RES (303)..(303): Ser at this position is modified with ppan-MC-MMAF

SEQ ID NO: 1265 - protein, 339 aa, Artificial Sequence; identical to SEQ ID NO: 341
  source: /note="Description of Artificial Sequence: Synthetic anti-hHER2-HC-G420-DS-ppan-MC-MMAF-LEFIASKLA-N421 polypeptide"
  MOD_RES (304)..(304): Ser at this position is modified with ppan-MC-MMAF

SEQ ID NO: 1266 - protein, 339 aa, Artificial Sequence; identical to SEQ ID NO: 342
  source: /note="Description of Artificial Sequence: Synthetic anti-hHER2-HC-N421-DS-ppan-MC-MMAF-LEFIASKLA-V422 polypeptide"
  MOD_RES (305)..(305): Ser at this position is modified with ppan-MC-MMAF

SEQ ID NO: 1267 - protein, 339 aa, Artificial Sequence; identical to SEQ ID NO: 343
  source: /note="Description of Artificial Sequence: Synthetic anti-hHER2-HC-H433-DS-ppan-MC-MMAF-LEFIASKLA-N434 polypeptide"
  MOD_RES (317)..(317): Ser at this position is modified with ppan-MC-MMAF

SEQ ID NO: 1268 - protein, 339 aa, Artificial Sequence; identical to SEQ ID NO: 344
  source: /note="Description of Artificial Sequence: Synthetic anti-hHER2-HC-N434-DS-ppan-MC-MMAF-LEFIASKLA-H435 polypeptide"
  MOD_RES (318)..(318): Ser at this position is modified with ppan-MC-MMAF

SEQ ID NO: 1269 - protein, 339 aa, Artificial Sequence; identical to SEQ ID NO: 346
  source: /note="Description of Artificial Sequence: Synthetic anti-hHER2-HC-L443-DS-ppan-MC-MMAF-LEFIASKLA-S444 polypeptide"
  MOD_RES (327)..(327): Ser at this position is modified with ppan-MC-MMAF

SEQ ID NO: 1270 - protein, 339 aa, Artificial Sequence; identical to SEQ ID NO: 349
  source: /note="Description of Artificial Sequence: Synthetic anti-hHER2-HC-G446-DS-ppan-MC-MMAF-LEFIASKLA-K447 polypeptide"
  MOD_RES (330)..(330): Ser at this position is modified with ppan-MC-MMAF

SEQ ID NO: 1271 - protein, 118 aa, Artificial Sequence; identical to SEQ ID NO: 31
  source: /note="Description of Artificial Sequence: Synthetic anti-hHER2-LC-T109-GDS-ppan-MC-MMAF-LSWLLRLLN-V110 polypeptide"
  MOD_RES (4)..(4): Ser at this position is modified with ppan-MC-MMAF

SEQ ID NO: 1272 - protein, 118 aa, Artificial Sequence; identical to SEQ ID NO: 32
  source: /note="Description of Artificial Sequence: Synthetic anti-hHER2-LC-V110-GDS-ppan-MC-MMAF-LSWLLRLLN-A111 polypeptide"
  MOD_RES (5)..(5): Ser at this position is modified with ppan-MC-MMAF

SEQ ID NO: 1273 - protein, 118 aa, Artificial Sequence; identical to SEQ ID NO: 33
  source: /note="Description of Artificial Sequence: Synthetic anti-hHER2-LC-A111-GDS-ppan-MC-MMAF-LSWLLRLLN-A112 polypeptide"
  MOD_RES (6)..(6): Ser at this position is modified with ppan-MC-MMAF

SEQ ID NO: 1274 - protein, 118 aa, Artificial Sequence; identical to SEQ ID NO: 34
  source: /note="Description of Artificial Sequence: Synthetic anti-hHER2-LC-P119-GDS-ppan-MC-MMAF-LSWLLRLLN-P120 polypeptide"
  MOD_RES (14)..(14): Ser at this position is modified with ppan-MC-MMAF

SEQ ID NO: 1275 - protein, 118 aa, Artificial Sequence; identical to SEQ ID NO: 37
  source: /note="Description of Artificial Sequence: Synthetic anti-hHER2-LC-D122-GDS-ppan-MC-MMAF-LSWLLRLLN-E123 polypeptide"
  MOD_RES (17)..(17): Ser at this position is modified with ppan-MC-MMAF

SEQ ID NO: 1276 - protein, 118 aa, Artificial Sequence; identical to SEQ ID NO: 38
  source: /note="Description of Artificial Sequence: Synthetic anti-hHER2-LC-Y140-GDS-ppan-MC-MMAF-LSWLLRLLN-P141 polypeptide"
  MOD_RES (35)..(35): Ser at this position is modified with ppan-MC-MMAF

SEQ ID NO: 1277 - protein, 118 aa, Artificial Sequence; identical to SEQ ID NO: 39
  source: /note="Description of Artificial Sequence: Synthetic anti-hHER2-LC-P141-GDS-ppan-MC-MMAF-LSWLLRLLN-R142 polypeptide"
  MOD_RES (36)..(36): Ser at this position is modified with ppan-MC-MMAF

SEQ ID NO: 1278 - protein, 118 aa, Artificial Sequence; identical to SEQ ID NO: 40
  source: /note="Description of Artificial Sequence: Synthetic anti-hHER2-LC-R142-GDS-ppan-MC-MMAF-LSWLLRLLN-E143 polypeptide"
  MOD_RES (37)..(37): Ser at this position is modified with ppan-MC-MMAF

SEQ ID NO: 1279 - protein, 118 aa, Artificial Sequence; identical to SEQ ID NO: 41
  source: /note="Description of Artificial Sequence: Synthetic anti-hHER2-LC-E143-GDS-ppan-MC-MMAF-LSWLLRLLN-A144 polypeptide"
  MOD_RES (38)..(38): Ser at this position is modified with ppan-MC-MMAF

SEQ ID NO: 1280 - protein, 118 aa, Artificial Sequence; identical to SEQ ID NO: 42
  source: /note="Description of Artificial Sequence: Synthetic anti-hHER2-LC-D151-GDS-ppan-MC-MMAF-LSWLLRLLN-N152 polypeptide"
  MOD_RES (46)..(46): Ser at this position is modified with ppan-MC-MMAF

SEQ ID NO: 1281 - protein, 118 aa, Artificial Sequence; identical to SEQ ID NO: 43
  source: /note="Description of Artificial Sequence: Synthetic anti-hHER2-LC-N152-GDS-ppan-MC-MMAF-LSWLLRLLN-A153 polypeptide"
  MOD_RES (47)..(47): Ser at this position is modified with ppan-MC-MMAF

SEQ ID NO: 1282 - protein, 118 aa, Artificial Sequence; identical to SEQ ID NO: 44
  source: /note="Description of Artificial Sequence: Synthetic anti-hHER2-LC-A153-GDS-ppan-MC-MMAF-LSWLLRLLN-L154 polypeptide"
  MOD_RES (48)..(48): Ser at this position is modified with ppan-MC-MMAF

SEQ ID NO: 1283 - protein, 118 aa, Artificial Sequence; identical to SEQ ID NO: 45
  source: /note="Description of Artificial Sequence: Synthetic anti-hHER2-LC-L154-GDS-ppan-MC-MMAF-LSWLLRLLN-Q155 polypeptide"
  MOD_RES (49)..(49): Ser at this position is modified with ppan-MC-MMAF

SEQ ID NO: 1284 - protein, 118 aa, Artificial Sequence; identical to SEQ ID NO: 46
  source: /note="Description of Artificial Sequence: Synthetic anti-hHER2-LC-Q155-GDS-ppan-MC-MMAF-LSWLLRLLN-S156 polypeptide"
  MOD_RES (50)..(50): Ser at this position is modified with ppan-MC-MMAF

SEQ ID NO: 1285 - protein, 118 aa, Artificial Sequence; identical to SEQ ID NO: 47
  source: /note="Description of Artificial Sequence: Synthetic anti-hHER2-LC-E161-GDS-ppan-MC-MMAF-LSWLLRLLN-S162 polypeptide"
  MOD_RES (56)..(56): Ser at this position is modified with ppan-MC-MMAF

SEQ ID NO: 1286 - protein, 118 aa, Artificial Sequence; identical to SEQ ID NO: 48
  source: /note="Description of Artificial Sequence: Synthetic anti-hHER2-LC-S162-GDS-ppan-MC-MMAF-LSWLLRLLN-V163 polypeptide"
  MOD_RES (57)..(57): Ser at this position is modified with ppan-MC-MMAF

SEQ ID NO: 1287 - protein, 118 aa, Artificial Sequence; identical to SEQ ID NO: 50
  source: /note="Description of Artificial Sequence: Synthetic anti-hHER2-LC-T164-GDS-ppan-MC-MMAF-LSWLLRLLN-E165 polypeptide"
  MOD_RES (59)..(59): Ser at this position is modified with ppan-MC-MMAF

SEQ ID NO: 1288 - protein, 118 aa, Artificial Sequence; identical to SEQ ID NO: 51
  source: /note="Description of Artificial Sequence: Synthetic anti-hHER2-LC-E165-GDS-ppan-MC-MMAF-LSWLLRLLN-Q166 polypeptide"
  MOD_RES (60)..(60): Ser at this position is modified with ppan-MC-MMAF

SEQ ID NO: 1289 - protein, 118 aa, Artificial Sequence; identical to SEQ ID NO: 52
  source: /note="Description of Artificial Sequence: Synthetic anti-hHER2-LC-Q166-GDS-ppan-MC-MMAF-LSWLLRLLN-D167 polypeptide"
  MOD_RES (61)..(61): Ser at this position is modified with ppan-MC-MMAF

SEQ ID NO: 1290 - protein, 118 aa, Artificial Sequence; identical to SEQ ID NO: 53
  source: /note="Description of Artificial Sequence: Synthetic anti-hHER2-LC-D167-GDS-ppan-MC-MMAF-LSWLLRLLN-S168 polypeptide"
  MOD_RES (62)..(62): Ser at this position is modified with ppan-MC-MMAF

SEQ ID NO: 1291 - protein, 118 aa, Artificial Sequence; identical to SEQ ID NO: 54
  source: /note="Description of Artificial Sequence: Synthetic anti-hHER2-LC-T197-GDS-ppan-MC-MMAF-LSWLLRLLN-H198 polypeptide"
  MOD_RES (92)..(92): Ser at this position is modified with ppan-MC-MMAF

SEQ ID NO: 1292 - protein, 118 aa, Artificial Sequence; identical to SEQ ID NO: 56
  source: /note="Description of Artificial Sequence: Synthetic anti-hHER2-LC-Q199-GDS-ppan-MC-MMAF-LSWLLRLLN-G200 polypeptide"
  MOD_RES (94)..(94): Ser at this position is modified with ppan-MC-MMAF

SEQ ID NO: 1293 - protein, 118 aa, Artificial Sequence; identical to SEQ ID NO: 59
  source: /note="Description of Artificial Sequence: Synthetic anti-hHER2-LC-S202-GDS-ppan-MC-MMAF-LSWLLRLLN-S203 polypeptide"
  MOD_RES (97)..(97): Ser at this position is modified with ppan-MC-MMAF

SEQ ID NO: 1294 - protein, 117 aa, Artificial Sequence; identical to SEQ ID NO: 63
  source: /note="Description of Artificial Sequence: Synthetic anti-hHER2-LC-V110-DS-ppan-MC-MMAF-LEFIASKLA-A111 polypeptide"
  MOD_RES (4)..(4): Ser at this position is modified with ppan-MC-MMAF

SEQ ID NO: 1295 - protein, 117 aa, Artificial Sequence; identical to SEQ ID NO: 64
  source: /note="Description of Artificial Sequence: Synthetic anti-hHER2-LC-A111-DS-ppan-MC-MMAF-LEFIASKLA-A112 polypeptide"
  MOD_RES (5)..(5): Ser at this position is modified with ppan-MC-MMAF

SEQ ID NO: 1296 - protein, 117 aa, Artificial Sequence; identical to SEQ ID NO: 65
  source: /note="Description of Artificial Sequence: Synthetic anti-hHER2-LC-P119-DS-ppan-MC-MMAF-LEFIASKLA-P120 polypeptide"
  MOD_RES (13)..(13): Ser at this position is modified with ppan-MC-MMAF

SEQ ID NO: 1297 - protein, 117 aa, Artificial Sequence; identical to SEQ ID NO: 66
  source: /note="Description of Artificial Sequence: Synthetic anti-hHER2-LC-P120-DS-ppan-MC-MMAF-LEFIASKLA-S121 polypeptide"
  MOD_RES (14)..(14): Ser at this position is modified with ppan-MC-MMAF

SEQ ID NO: 1298 - protein, 117 aa, Artificial Sequence; identical to SEQ ID NO: 67
  source: /note="Description of Artificial Sequence: Synthetic anti-hHER2-LC-S121-DS-ppan-MC-MMAF-LEFIASKLA-D122 polypeptide"
  MOD_RES (15)..(15): Ser at this position is modified with ppan-MC-MMAF

SEQ ID NO: 1299 - protein, 117 aa, Artificial Sequence; identical to SEQ ID NO: 68
  source: /note="Description of Artificial Sequence: Synthetic anti-hHER2-LC-D122-DS-ppan-MC-MMAF-LEFIASKLA-E123 polypeptide"
  MOD_RES (16)..(16): Ser at this position is modified with ppan-MC-MMAF

SEQ ID NO: 1300 - protein, 117 aa, Artificial Sequence; identical to SEQ ID NO: 69
  source: /note="Description of Artificial Sequence: Synthetic anti-hHER2-LC-Y140-DS-ppan-MC-MMAF-LEFIASKLA-P141 polypeptide"
  MOD_RES (34)..(34): Ser at this position is modified with ppan-MC-MMAF

SEQ ID NO: 1301 - protein, 117 aa, Artificial Sequence; identical to SEQ ID NO: 71
  source: /note="Description of Artificial Sequence: Synthetic anti-hHER2-LC-R142-DS-ppan-MC-MMAF-LEFIASKLA-E143 polypeptide"
  MOD_RES (36)..(36): Ser at this position is modified with ppan-MC-MMAF

SEQ ID NO: 1302 - protein, 117 aa, Artificial Sequence; identical to SEQ ID NO: 72
  source: /note="Description of Artificial Sequence: Synthetic anti-hHER2-LC-E143-DS-ppan-MC-MMAF-LEFIASKLA-A144 polypeptide"
  MOD_RES (37)..(37): Ser at this position is modified with ppan-MC-MMAF

SEQ ID NO: 1303 - protein, 117 aa, Artificial Sequence; identical to SEQ ID NO: 73
  source: /note="Description of Artificial Sequence: Synthetic anti-hHER2-LC-D151-DS-ppan-MC-MMAF-LEFIASKLA-N152 polypeptide"
  MOD_RES (45)..(45): Ser at this position is modified with ppan-MC-MMAF

SEQ ID NO: 1304 - protein, 117 aa, Artificial Sequence; identical to SEQ ID NO: 74
  source: /note="Description of Artificial Sequence: Synthetic anti-hHER2-LC-N152-DS-ppan-MC-MMAF-LEFIASKLA-A153 polypeptide"
  MOD_RES (46)..(46): Ser at this position is modified with ppan-MC-MMAF

SEQ ID NO: 1305 - protein, 117 aa, Artificial Sequence; identical to SEQ ID NO: 75
  source: /note="Description of Artificial Sequence: Synthetic anti-hHER2-LC-A153-DS-ppan-MC-MMAF-LEFIASKLA-L154 polypeptide"
  MOD_RES (47)..(47): Ser at this position is modified with ppan-MC-MMAF

SEQ ID NO: 1306 - protein, 117 aa, Artificial Sequence; identical to SEQ ID NO: 76
  source: /note="Description of Artificial Sequence: Synthetic anti-hHER2-LC-L154-DS-ppan-MC-MMAF-LEFIASKLA-Q155 polypeptide"
  MOD_RES (48)..(48): Ser at this position is modified with ppan-MC-MMAF

SEQ ID NO: 1307 - protein, 117 aa, Artificial Sequence; identical to SEQ ID NO: 77
  source: /note="Description of Artificial Sequence: Synthetic anti-hHER2-LC-Q155-DS-ppan-MC-MMAF-LEFIASKLA-S156 polypeptide"
  MOD_RES (49)..(49): Ser at this position is modified with ppan-MC-MMAF

SEQ ID NO: 1308 - protein, 117 aa, Artificial Sequence; identical to SEQ ID NO: 79
  source: /note="Description of Artificial Sequence: Synthetic anti-hHER2-LC-S162-DS-ppan-MC-MMAF-LEFIASKLA-V163 polypeptide"
  MOD_RES (56)..(56): Ser at this position is modified with ppan-MC-MMAF

SEQ ID NO: 1309 - protein, 117 aa, Artificial Sequence; identical to SEQ ID NO: 81
  source: /note="Description of Artificial Sequence: Synthetic anti-hHER2-LC-T164-DS-ppan-MC-MMAF-LEFIASKLA-E165 polypeptide"
  MOD_RES (58)..(58): Ser at this position is modified with ppan-MC-MMAF

SEQ ID NO: 1310 - protein, 117 aa, Artificial Sequence; identical to SEQ ID NO: 82
  source: /note="Description of Artificial Sequence: Synthetic anti-hHER2-LC-E165-DS-ppan-MC-MMAF-LEFIASKLA-Q166 polypeptide"
  MOD_RES (59)..(59): Ser at this position is modified with ppan-MC-MMAF

SEQ ID NO: 1311 - protein, 117 aa, Artificial Sequence; identical to SEQ ID NO: 83
  source: /note="Description of Artificial Sequence: Synthetic anti-hHER2-LC-Q166-DS-ppan-MC-MMAF-LEFIASKLA-D167 polypeptide"
  MOD_RES (60)..(60): Ser at this position is modified with ppan-MC-MMAF

SEQ ID NO: 1312 - protein, 117 aa, Artificial Sequence; identical to SEQ ID NO: 84
  source: /note="Description of Artificial Sequence: Synthetic anti-hHER2-LC-D167-DS-ppan-MC-MMAF-LEFIASKLA-S168 polypeptide"
  MOD_RES (61)..(61): Ser at this position is modified with ppan-MC-MMAF

SEQ ID NO: 1313 - protein, 117 aa, Artificial Sequence; identical to SEQ ID NO: 85
  source: /note="Description of Artificial Sequence: Synthetic anti-hHER2-LC-T197-DS-ppan-MC-MMAF-LEFIASKLA-H198 polypeptide"
  MOD_RES (91)..(91): Ser at this position is modified with ppan-MC-MMAF

SEQ ID NO: 1314 - protein, 117 aa, Artificial Sequence; identical to SEQ ID NO: 87
  source: /note="Description of Artificial Sequence: Synthetic anti-hHER2-LC-Q199-DS-ppan-MC-MMAF-LEFIASKLA-G200 polypeptide"
  MOD_RES (93)..(93): Ser at this position is modified with ppan-MC-MMAF

SEQ ID NO: 1315 - protein, 117 aa, Artificial Sequence; identical to SEQ ID NO: 88
  source: /note="Description of Artificial Sequence: Synthetic anti-hHER2-LC-G200-DS-ppan-MC-MMAF-LEFIASKLA-L201 polypeptide"
  MOD_RES (94)..(94): Ser at this position is modified with ppan-MC-MMAF

SEQ ID NO: 1316 - protein, 117 aa, Artificial Sequence; identical to SEQ ID NO: 89
  source: /note="Description of Artificial Sequence: Synthetic anti-hHER2-LC-L201-DS-ppan-MC-MMAF-LEFIASKLA-S202 polypeptide"
  MOD_RES (95)..(95): Ser at this position is modified with ppan-MC-MMAF

SEQ ID NO: 1317 - protein, 117 aa, Artificial Sequence; identical to SEQ ID NO: 91
  source: /note="Description of Artificial Sequence: Synthetic anti-hHER2-LC-S203-DS-ppan-MC-MMAF-LEFIASKLA-P204 polypeptide"
  MOD_RES (97)..(97): Ser at this position is modified with ppan-MC-MMAF

SEQ ID NO: 1318 - protein, 118 aa, Artificial Sequence; identical to SEQ ID NO: 60
  source: /note="Description of Artificial Sequence: Synthetic anti-hHER2-LC-S203-GDS-ppan-MC-MMAF-LSWLLRLLN-P204 polypeptide"
  MOD_RES (98)..(98): Ser at this position is modified with ppan-MC-MMAF

SEQ ID NO: 1319 - protein, 118 aa, Artificial Sequence; identical to SEQ ID NO: 61
  source: /note="Description of Artificial Sequence: Synthetic anti-hHER2-LC-K207-GDS-ppan-MC-MMAF-LSWLLRLLN-S208 polypeptide"
  MOD_RES (102)..(102): Ser at this position is modified with ppan-MC-MMAF

SEQ ID NO: 1320 - protein, 117 aa, Artificial Sequence; identical to SEQ ID NO: 90
  source: /note="Description of Artificial Sequence: Synthetic anti-hHER2-LC-S202-DS-ppan-MC-MMAF-LEFIASKLA-S203 polypeptide"
  MOD_RES (96)..(96): Ser at this position is modified with ppan-MC-MMAF

SEQ ID NO: 1321 - protein, 340 aa, Artificial Sequence; identical to SEQ ID NO: 370
  source: /note="Description of Artificial Sequence: Synthetic anti-hHER2-HC-G161-GDS-ppan-MC-MMAF-LDMLEWSLM-A162 polypeptide"
  MOD_RES (46)..(46): Ser at this position is modified with ppan-MC-MMAF

SEQ ID NO: 1322 - protein, 340 aa, Artificial Sequence; identical to SEQ ID NO: 372
  source: /note="Description of Artificial Sequence: Synthetic anti-hHER2-HC-L163-GDS-ppan-MC-MMAF-LDMLEWSLM-T164 polypeptide"
  MOD_RES (48)..(48): Ser at this position is modified with ppan-MC-MMAF

SEQ ID NO: 1323 - protein, 340 aa, Artificial Sequence; identical to SEQ ID NO: 374
  source: /note="Description of Artificial Sequence: Synthetic anti-hHER2-HC-S165-GDS-ppan-MC-MMAF-LDMLEWSLM-G166 polypeptide"
  MOD_RES (50)..(50): Ser at this position is modified with ppan-MC-MMAF

SEQ ID NO: 1324 - protein, 340 aa, Artificial Sequence; identical to SEQ ID NO: 376
  source: /note="Description of Artificial Sequence: Synthetic anti-hHER2-HC-S190-GDS-ppan-MC-MMAF-LDMLEWSLM-S191 polypeptide"
  MOD_RES (75)..(75): Ser at this position is modified with ppan-MC-MMAF

SEQ ID NO: 1325 - protein, 340 aa, Artificial Sequence; identical to SEQ ID NO: 377
  source: /note="Description of Artificial Sequence: Synthetic anti-hHER2-HC-S191-GDS-ppan-MC-MMAF-LDMLEWSLM-S192 polypeptide"
  MOD_RES (76)..(76): Ser at this position is modified with ppan-MC-MMAF

SEQ ID NO: 1326 - protein, 340 aa, Artificial Sequence; identical to SEQ ID NO: 378
  source: /note="Description of Artificial Sequence: Synthetic anti-hHER2-HC-S192-GDS-ppan-MC-MMAF-LDMLEWSLM-L193 polypeptide"
  MOD_RES (77)..(77): Ser at this position is modified with ppan-MC-MMAF

SEQ ID NO: 1327 - protein, 341 aa, Artificial Sequence
  source: /note="Description of Artificial Sequence: Synthetic anti-hHER2-HC-G194-GDS-ppan-MC-MMAF-LDMLEWSLM-T195 polypeptide"
  MOD_RES (79)..(79): Ser at this position is modified with ppan-MC-MMAF
STKGPSVFPLAPSSKSTSGGTAALGCLVKDYFPEPVTVSWNSGALTSGVHTFPAVLQSSGLYSLSSVVTVPSSSLGGDSLDMLEWSLMNTQTYICNVNHKPSNTKVDKKVEPKSCDKTHTCPPCPAPELLGGPSVFLFPPKPKDTLMISRTPEVTCVVVDVSHEDPEVKFNWYVDGVEVHNAKTKPREEQYNSTYRVVSVLTVLHQDWLNGKEYKCKVSNKALPAPIEKTISKAKGQPREPQVYTLPPSREEMTKNQVSLTCLVKGFYPSDIAVEWESNGQPENNYKTTPPVLDSDGSFFLYSKLTVDKSRWQQGNVFSCSVMHEALHNHYTQKSLSLSPG

SEQ ID NO: 1328 - protein, 341 aa, Artificial Sequence
  source: /note="Description of Artificial Sequence: Synthetic anti-hHER2-HC-T195-GDS-ppan-MC-MMAF-LDMLEWSLM-Q196 polypeptide"
  MOD_RES (80)..(80): Ser at this position is modified with ppan-MC-MMAF
STKGPSVFPLAPSSKSTSGGTAALGCLVKDYFPEPVTVSWNSGALTSGVHTFPAVLQSSGLYSLSSVVTVPSSSLGTGDSLDMLEWSLMNQTYICNVNHKPSNTKVDKKVEPKSCDKTHTCPPCPAPELLGGPSVFLFPPKPKDTLMISRTPEVTCVVVDVSHEDPEVKFNWYVDGVEVHNAKTKPREEQYNSTYRVVSVLTVLHQDWLNGKEYKCKVSNKALPAPIEKTISKAKGQPREPQVYTLPPSREEMTKNQVSLTCLVKGFYPSDIAVEWESNGQPENNYKTTPPVLDSDGSFFLYSKLTVDKSRWQQGNVFSCSVMHEALHNHYTQKSLSLSPG

SEQ ID NO: 1329 - protein, 118 aa, Artificial Sequence; identical to SEQ ID NO: 383
  source: /note="Description of Artificial Sequence: Synthetic anti-hHER2-LC-T109-GDS-ppan-MC-MMAF-LDMLEWSLM-V110 polypeptide"
  MOD_RES (4)..(4): Ser at this position is modified with ppan-MC-MMAF

SEQ ID NO: 1330 - protein, 118 aa, Artificial Sequence; identical to SEQ ID NO: 384
  source: /note="Description of Artificial Sequence: Synthetic anti-hHER2-LC-V110-GDS-ppan-MC-MMAF-LDMLEWSLM-A111 polypeptide"
  MOD_RES (5)..(5): Ser at this position is modified with ppan-MC-MMAF
